(19) United States
(12) Patent Application Publication
(10) Pub. No.: US 2006/0194265 A1
(43) Pub. Date: Aug. 31, 2006

(54) Novel therapeutic targets in cancer

(76) Inventors: David W. Morris, Davis, CA (US); Marc S. Malandro, Gibsonia, PA (US)

Correspondence Address: Lisa E. Alexander;Sagres Discovery, Inc., c/o Chiron Corporation, P.O. Box 8097, Emeryville, CA, 94662-8097, US

(21) Appl. No.: 10/669,920

(22) Filed: Sep. 23, 2003

Related U.S. Application Data
(63) Continuation-in-part of application No. 10/004,113, filed on Oct. 23, 2001, now abandoned.
(63) Continuation-in-part of application No. 10/052,482, filed on Nov. 8, 2001, now abandoned.
(63) Continuation-in-part of application No. 09/997,722, filed on Nov. 30, 2001, now abandoned.
(63) Continuation-in-part of application No. 10/034,650, filed on Dec. 20, 2001.
(63) Continuation-in-part of application No. 10/085,117, filed on Feb. 27, 2002, now abandoned.
(63) Continuation-in-part of application No. 10/087,192, filed on Mar. 1, 2002.
(63) Continuation-in-part of application No. 10/322,281, filed on Dec. 17, 2002.
(63) Continuation-in-part of application No. 10/322,696, filed on Dec. 17, 2002.

(51) Int. Cl. G01N 33/574; C07H 21/04; C12P 21/06; A61K 39/395; C07K 14/82; C07K 16/30

(52) U.S. Cl. 435/7.23; 435/69.1; 435/320.1; 435/325; 530/350; 424/155.1; 530/388.8; 536/23.5

(57) ABSTRACT

The present invention relates to novel sequences for use in detection, diagnosis and treatment of cancers, especially lymphomas. The invention provides cancer-associated (CA) polynucleotide sequences whose expression is associated with cancer. The present invention provides CA polypeptides associated with cancer that are present on the cell surface and present novel therapeutic targets against cancer. The present invention further provides diagnostic compositions and methods for the detection of cancer. The present invention provides monoclonal and polyclonal antibodies specific for the CA polypeptides. The present invention also provides diagnostic tools and therapeutic compositions and methods for screening, prevention and treatment of cancer.

### CROSS-REFERENCE TO RELATED APPLICATIONS

[0001] This application is a continuation-in-part of the following U.S. applications: U.S. Ser. No. 10/004,113, filed Oct. 23, 2001; U.S. Ser. No. 10/052,482, filed Nov. 11, 2001; U.S. Ser. No. 09/997,722, filed Nov. 30, 2001; U.S. Ser. No. 10/034,650, filed Dec. 20, 2001; U.S. Ser. No. 10/085,117, filed Feb. 27, 2002; U.S. Ser. No. 10/087,192, filed Mar. 1, 2002; U.S. Ser. No. 10/322,281, filed Dec. 17, 2002; and U.S. Ser. No. 10/322,696, filed Dec. 17, 2002, all of which are expressly incorporated herein by reference in their entirety.

### DESCRIPTION OF ACCOMPANYING CD-ROMS

[0002] Tables 1-124 are filed herewith in CD-ROM in accordance with 37 C.F.R. §§ 1.52 and 1.58. Two identical copies (marked “Copy 1” and “Copy 2”) of this CD-ROM are submitted.

[0003] Contents of the CD-ROM disks submitted herewith are hereby incorporated by reference into the Specification.

### TECHNICAL FIELD OF THE INVENTION

[0004] This invention relates generally to the field of cancer-associated genes. Specifically, it relates to novel sequences for use in diagnosis and treatment of cancer and tumors, as well as the use of the novel compositions in screening methods. The present invention provides methods of using cancer associated polynucleotides, their corresponding gene products and antibodies specific for the gene products in the detection, diagnosis, prevention and/or treatment of associated cancers.

### BACKGROUND OF THE INVENTION

[0005] Oncogenes are genes that can cause cancer. Carcinogenesis can occur by a wide variety of mechanisms, including infection of cells by viruses containing oncogenes, activation of protooncogenes in the host genome, and mutations of protooncogenes and tumor suppressor genes. Carcinogenesis is fundamentally driven by somatic cell evolution (i.e. mutation and natural selection of variants with progressive loss of growth control). The genes that serve as targets for these somatic mutations are classified as either protooncogenes or tumor suppressor genes, depending on whether their mutant phenotypes are dominant or recessive, respectively.

[0006] There are a number of viruses known to be involved in human cancer as well as in animal cancer. Of particular interest here are viruses that do not contain oncogenes themselves; these are slow-transforming retroviruses. They induce tumors by integrating into the host genome and affecting neighboring protooncogenes in a variety of ways. Provirus insertion mutation is a normal consequence of the retroviral life cycle. In infected cells, a DNA copy of the retrovirus genome (called a provirus) is integrated into the host genome. A newly integrated provirus can affect gene expression in cis at or near the integration site by one of two mechanisms. Type I insertion mutations up-regulate transcription of proximal genes as a consequence of regulatory sequences (enhancers and/or promoters) within the proviral long terminal repeats (LTRs). Type II insertion mutations cause truncation of coding regions due to either integration directly within an open reading frame or integration within an intron flanked on both sides by coding sequences. The analysis of sequences at or near the insertion sites has led to the identification of a number of new protooncogenes.

[0007] With respect to lymphoma and leukemia, retroviruses such as AKV murine leukemia virus (MLV) or SL3-3 MLV, are potent inducers of tumors when inoculated into susceptible newborn mice, or when carried in the germline. A number of sequences have been identified as relevant in the induction of lymphoma and leukemia by analyzing the insertion sites; see Sorensen et al., J. of Virology 74:2161 (2000); Hansen et al., Genome Res. 10(2):237-43 (2000); Sorensen et al., J. Virology 70:4063 (1996); Sorensen et al., J. Virology 67:7118 (1993); Joosten et al., Virology 268:308 (2000); and Li et al., Nature Genetics 23:348 (1999); all of which are expressly incorporated by reference herein. With respect to cancers, especially breast cancer, prostate cancer and cancers with epithelial origin, the mammalian retrovirus, mouse mammary tumor virus (MMTV) is a potent inducer of tumors when inoculated into susceptible newborn mice, or when carried in the germ line. Mammary Tumors in the Mouse, edited by J. Hilgers and M. Sluyser; Elsevier/North-Holland Biomedical Press; New York, N.Y.

[0008] The pattern of gene expression in a particular living cell is characteristic of its current state. Nearly all differences in the state or type of a cell are reflected in the differences in RNA levels of one or more genes. Comparing expression patterns of uncharacterized genes may provide clues to their function. High throughput analysis of expression of hundreds or thousands of genes can help in (a) identification of complex genetic diseases, (b) analysis of differential gene expression over time, between tissues and disease states, and (c) drug discovery and toxicology studies. Increase or decrease in the levels of expression of certain genes correlate with cancer biology. For example, oncogenes are positive regulators of tumorigenesis, while tumor suppressor genes are negative regulators of tumorigenesis. (Marshall, Cell, 64: 313-326 (1991); Weinberg, Science, 254: 1138-1146 (1991)).

[0009] Accordingly, it is an object of the invention to provide polynucleotide and polypeptide sequences involved in cancer and, in particular, in oncogenesis.

[0010] Immunotherapy, or the use of antibodies for therapeutic purposes has been used in recent years to treat cancer. Passive immunotherapy involves the use of monoclonal antibodies in cancer treatments. See for example, Cancer: Principles and Practice of Oncology, 6^{th} Edition (2001) Chapt. 20 pp. 495-508. Inherent therapeutic biological activity of these antibodies include direct inhibition of tumor cell growth or survival, and the ability to recruit the natural cell killing activity of the body's immune system. These agents are administered alone or in conjunction with radiation or chemotherapeutic agents. Rituxan® and Herceptin®, approved for treatment of lymphoma and breast cancer, respectively, are two examples of such therapeutics. Alternatively, antibodies are used to make antibody conjugates where the antibody is linked to a toxic agent and directs that agent to the tumor by specifically binding to the tumor. Mylotarg® is an example of an approved antibody conjugate used for the treatment of leukemia.

[0011] Accordingly, it is another object of this invention to provide antigens (cancer-associated polypeptides) associated with a variety of cancers as targets for diagnostic and/or therapeutic antibodies. These antigens are also useful for drug discovery (e.g., small molecules) and for further characterization of cellular regulation, growth, and differentiation.

### SUMMARY OF THE INVENTION

[0012] In accordance with the objects outlined above, the present invention provides methods for screening for compositions that modulate cancer, especially lymphoma and leukemia. The present invention also provides methods for screening for compositions which modulate carcinomas, especially mammary adenocarcinomas. Also provided herein are methods of inhibiting proliferation of a cell, preferably a lymphoma cell or a breast cancer cell. Methods of treatment of cancer, including diagnosis, are also provided herein.

[0013] In one aspect, a method of screening drug candidates comprises providing a cell that expresses a cancer-associated (CA) gene or fragments thereof. Preferred embodiments of CA genes are genes that are differentially expressed in cancer cells, preferably lymphatic, breast, prostate or epithelial cells, compared to other cells. Preferred embodiments of CA genes used in the methods herein include, but are not limited to the nucleic acids selected from Tables 1-124 (human genomic sequences of SEQ ID NOS: 4, 10, 16, 26, 32, 46, 60, 70, 80, 96, 114, 137, 153, 173, 187, 209, 223, 229, 235, 243, 255, 261, 267,281,293,303,311, 321,341,359,367, 375, 383, 397, 407, 413, 427, 449, 455, 463, 473, 481, 491, 499, 507, 515, 521, 527, 541, 547, 555, 563, 643, 651, 659, 669, 681, 715, 723, 743, 749, 759, 775, 787, 793, 805, 811, 817, 823, 833, 839, 851, 861, 871, 879, 899, 909, 917, 930, 938, 950, 966, 976, 990, 1002, 1016, 1024, 1040, 1046, 1054, 1068, 1082, 1088, 1102, 1112, 1122, 1130, 1140, 1151, 1165, 1175, 1185, 1193, 1205, 1211, 1235, 1241, 1255, 1267, 1277, 1295, 1301, 1313, 1349, 1357, 1369, 1377, 1383, 1391, 1403, 1411, 1419, 1425, 1431, and 1439, and sequences of SEQ ID NOS: 5, 11, 17, 19, 21, 27, 33, 47, 49, 51, 53, 55, 61, 63, 65, 71, 81, 83, 85, 87, 89, 97, 99, 101, 103, 105, 107, 109, 115, 117, 119, 121, 123, 125, 127, 129, 138, 140, 142, 144, 146, 148, 154, 156, 158, 160, 162, 164, 166, 168, 174, 176, 178, 180, 188, 190, 192, 194, 196, 198, 200, 202, 204, 210, 212, 214, 216, 218, 224, 230, 236, 238, 244, 246, 248, 250, 256, 262, 268, 270, 272, 274, 276, 282, 284, 286, 288, 294, 296, 298, 304, 306, 312, 314, 316, 322, 324, 326, 328, 330, 332, 342, 344, 346, 348, 350, 352, 354, 360, 368, 370, 376, 384, 386, 388, 390, 392, 398, 400, 402, 408, 414, 416, 418, 420, 428, 430, 432, 434, 436, 438, 440, 442, 444, 450, 456, 458, 464, 466, 468, 474, 476, 482, 484, 486, 492, 494, 500, 508, 510, 516, 522, 528, 530, 532, 534, 536, 542, 548, 550, 556, 558, 564, 566, 568, 570, 572, 574, 576, 578, 580, 582, 584, 586, 588, 590, 592, 594, 596, 598, 600, 602, 604, 606, 608, 610, 612, 614, 616, 618, 620, 622, 624, 626, 628, 630, 632, 634, 644, 646, 652, 654, 660, 662, 664, 670, 672, 674, 676, 682, 684, 686, 688, 690, 692, 694, 696, 698, 700, 702, 704, 706, 708, 710, 716, 718, 724, 726, 728, 730, 732, 734, 736, 744, 750, 752, 754, 760, 776, 778, 780, 782, 788, 794, 796, 798, 800, 806, 812, 818, 824, 826, 828, 834, 840, 842, 844, 846, 852, 854, 856, 862, 864, 866, 872, 874, 880, 882, 884, 886, 888, 890, 892, 894, 900, 902, 910, 912, 918, 920, 922, 931, 933, 939, 941, 943, 945, 951, 953, 955, 957, 959, 961, 967, 969, 977, 979, 981, 983, 985, 991, 993, 995, 997, 1003, 1005, 1017, 1025, 1027, 1029, 1031, 1033, 1035, 1041, 1047, 1049, 1055, 1057, 1059, 1061, 1063, 1069, 1071, 1073, 1075, 1077, 1083, 1089, 1091, 1093, 1103, 1105, 1113, 1115, 1117, 1123, 1125, 1131, 1133, 1135, 1141, 1143, 1145, 1147, 1149, 1152, 1154, 1156, 1158, 1160, 1166, 1168, 1170, 1176, 1178, 1180, 1186, 1188, 1194, 1196, 1198, 1200, 1206, 1212, 1214, 1216, 1218, 1220, 1222, 1224, 1226, 1228, 1230, 1236, 1242, 1244, 1246, 1248, 1250, 1256, 1258, 1260, 1262, 1268, 1270, 1272, 1278, 1280, 1282, 1284, 1286, 1288, 1290, 1296, 1302, 1304, 1306, 1308, 1314, 1316, 1318, 1320, 1322, 1324, 1326, 1328, 1330, 1332, 1334, 1336, 1338, 1340, 1342, 1350, 1352, 1358, 1360, 1362, 1364, 1370, 1372, 1378, 1384, 1386, 1392, 1394, 1396, 1398, 1404, 1406, 1412, 1414, 1420, 1426, 1432, 1434, and 1440 corresponding to the human mRNAs generated therefrom). The methods further include adding a drug candidate to the cell and determining the effect of the drug candidate on the expression of the CA gene.

[0014] In one embodiment, the method of screening drug candidates includes comparing the level of expression in the absence of the drug candidate to the level of expression in the presence of the drug candidate.

[0015] Also provided herein is a method of screening for a bioactive agent capable of binding to a CA protein (CAP), the method comprising combining the CAP and a candidate bioactive agent, and determining the binding of the candidate agent to the CAP.

[0016] Further provided herein is a method for screening for a bioactive agent capable of modulating the activity of a CAP. In one embodiment, the method comprises combining the CAP and a candidate bioactive agent, and determining the effect of the candidate agent on the bioactivity of the CAP.

[0017] Also provided is a method of evaluating the effect of a candidate cancer drug comprising administering the drug to a patient and removing a cell sample from the patient. The expression profile of the cell is then determined. This method may further comprise comparing the expression profile of the patient to an expression profile of a healthy individual.

[0018] In a further aspect, a method for inhibiting the activity of a CA protein is provided. In one embodiment, the method comprises administering to a patient an inhibitor of a CA protein preferably selected from the group consisting of the sequences outlined in Tables 1-124 (SEQ ID NOS: 6, 12, 18, 20, 22, 28, 34, 48, 50, 52, 54, 56, 62, 64, 66, 72, 82,84,86,88, 90, 98, 100, 102, 104, 106, 108, 110, 116, 118, 120, 122, 124, 126, 128, 130, 139, 141, 143, 145, 147, 149, 155, 157, 159, 161, 163, 165, 167, 169, 175, 177, 179, 181, 189, 191, 193, 195, 197, 199, 201, 203, 205, 211, 213, 215, 217, 219, 225, 231, 237, 239, 245, 247, 249, 251, 257, 263, 269, 271, 273, 275, 277, 283, 285, 287, 289, 295, 297, 299, 305, 307, 313, 315, 317, 323, 325, 327, 329, 331, 333, 343, 345, 347, 349, 351, 353, 355, 361, 369, 371, 377, 385, 387, 389, 391, 393, 399, 401, 403, 409, 415, 417, 419, 421, 429, 431, 433, 435, 437, 439, 441, 443, 445, 451, 457, 459, 465, 467, 469, 475, 477, 483, 485, 487, 493, 495, 501, 509, 511, 517, 523, 529, 531, 533, 535, 537, 543, 549, 551, 557, 559, 565, 567, 569, 571, 573, 575, 577, 579, 581, 583, 585, 587, 589, 591, 593, 595, 597, 599, 601, 603, 605, 607, 609, 611, 613, 615, 617, 619, 621, 623, 625, 627, 629, 631, 633, 635, 645, 647, 653, 655, 661, 663, 665, 671, 673, 675, 677, 683, 685, 687, 689, 691, 693, 695, 697, 699, 701, 703, 705, 707, 709, 711, 717, 719, 725, 727, 729, 731, 733, 735, 737, 745, 751, 753, 755, 761, 777, 779, 781, 783, 789, 795, 797, 799, 801, 807, 813, 819, 825, 827, 829, 835, 841, 843, 845, 847, 853, 855, 857, 863, 865, 867, 873, 875, 881, 883, 885, 887, 889, 891, 893, 895, 901, 903, 911, 913, 919, 921, 923, 932, 934, 940, 942, 944, 946, 952, 954, 956, 958, 960, 962, 968, 970, 978, 980, 982, 984, 986, 992, 994, 996, 998, 1004, 1006, 1018, 1026, 1028, 1030, 1032, 1034, 1036, 1042, 1048, 1050, 1056, 1058, 1060, 1062, 1064, 1070, 1072, 1074, 1076, 1078, 1084, 1090, 1092, 1094, 1104, 1106, 1114, 1116, 1118, 1124, 1126, 1132, 1134, 1136, 1142, 1144, 1146, 1148, 1150, 1153, 1155, 1157, 1159, 1161, 1167, 1169, 1171, 1177, 1179, 1181, 1187, 1189, 1195, 1197, 1199, 1201, 1207, 1213, 1215, 1217, 1219, 1221, 1223, 1225, 1227, 1229, 1231, 1237, 1243, 1245, 1247, 1249, 1251, 1257, 1259, 1261, 1263, 1269, 1271, 1273, 1279, 1281, 1283, 1285, 1287, 1289, 1291, 1297, 1303, 1305, 1307, 1309, 1315, 1317, 1319, 1321, 1323, 1325, 1327, 1329, 1331, 1333, 1335, 1337, 1339, 1341, 1343, 1351, 1353, 1359, 1361, 1363, 1365, 1371, 1373, 1379, 1385, 1387, 1393, 1395, 1397, 1399, 1405, 1407, 1413, 1415, 1421, 1427, 1433, 1435, and 1441).

[0019] A method of neutralizing the effect of a CA protein, preferably a protein encoded by a nucleic acid selected from the group of sequences outlined in Tables 1-124 (human genomic sequences of SEQ ID NOS: 4, 10, 16, 26, 32, 46, 60, 70, 80, 96, 114, 137, 153, 173, 187, 209, 223, 229, 235, 243, 255, 261, 267, 281, 293, 303, 311, 321, 341, 359, 367, 375, 383, 397, 407, 413, 427, 449, 455, 463, 473, 481, 491, 499, 507, 515, 521, 527, 541, 547, 555, 563, 643, 651, 659, 669, 681, 715, 723, 743, 749, 759, 775, 787, 793, 805, 811, 817, 823, 833, 839, 851, 861, 871, 879, 899, 909, 917, 930, 938, 950, 966, 976, 990, 1002, 1016, 1024, 1040, 1046, 1054, 1068, 1082, 1088, 1102, 1112, 1122, 1130, 1140, 1151, 1165, 1175, 1185, 1193, 1205, 1211, 1235, 1241, 1255, 1267, 1277, 1295, 1301, 1313, 1349, 1357, 1369, 1377, 1383, 1391, 1403, 1411, 1419, 1425, 1431, and 1439, and sequences of SEQ ID NOS: 5, 11, 17, 19, 21, 27, 33, 47, 49, 51, 53, 55, 61, 63, 65, 71, 81, 83, 85, 87, 89, 97, 99, 101, 103, 105, 107, 109, 115, 117, 119, 121, 123, 125, 127, 129, 138, 140, 142, 144, 146, 148, 154, 156, 158, 160, 162, 164, 166, 168, 174, 176, 178, 180, 188, 190, 192, 194, 196, 198, 200, 202, 204, 210, 212, 214, 216, 218, 224, 230, 236, 238, 244, 246, 248, 250, 256, 262, 268, 270, 272, 274, 276, 282, 284, 286, 288, 294, 296, 298, 304, 306, 312, 314, 316, 322, 324, 326, 328, 330, 332, 342, 344, 346, 348, 350, 352, 354, 360, 368, 370, 376, 384, 386, 388, 390, 392, 398, 400, 402, 408, 414, 416, 418, 420, 428, 430, 432, 434, 436, 438, 440, 442, 444, 450, 456, 458, 464, 466, 468, 474, 476, 482, 484, 486, 492, 494, 500, 508, 510, 516, 522, 528, 530, 532, 534, 536, 542, 548, 550, 556, 558, 564, 566, 568, 570, 572, 574, 576, 578, 580, 582, 584, 586, 588, 590, 592, 594, 596, 598, 600, 602, 604, 606, 608, 610, 612, 614, 616, 618, 620, 622, 624, 626, 628, 630, 632, 634, 644, 646, 652, 654, 660, 662, 664, 670, 672, 674, 676, 682, 684, 686, 688, 690, 692, 694, 696, 698, 700, 702, 704, 706, 708, 710, 716, 718, 724, 726, 728, 730, 732, 734, 736, 744, 750, 752, 754, 760, 776, 778, 780, 782, 788, 794, 796, 798, 800, 806, 812, 818, 824, 826, 828, 834, 840, 842, 844, 846, 852, 854, 856, 862, 864, 866, 872, 874, 880, 882, 884, 886, 888, 890, 892, 894, 900, 902, 910, 912, 918, 920, 922, 931, 933, 939, 941, 943, 945, 951, 953, 955, 957, 959, 961, 967, 969, 977, 979, 981, 983, 985, 991, 993, 995, 997, 1003, 1005, 1017, 1025, 1027, 1029, 1031, 1033, 1035, 1041, 1047, 1049, 1055, 1057, 1059, 1061, 1063, 1069, 1071, 1073, 1075, 1077, 1083, 1089, 1091, 1093, 1103, 1105, 1113, 1115, 1117, 1123, 1125, 1131, 1133, 1135, 1141, 1143, 1145, 1147, 1149, 1152, 1154, 1156, 1158, 1160, 1166, 1168, 1170, 1176, 1178, 1180, 1186, 1188, 1194, 1196, 1198, 1200, 1206, 1212, 1214, 1216, 1218, 1220, 1222, 1224, 1226, 1228, 1230, 1236, 1242, 1244, 1246, 1248, 1250, 1256, 1258, 1260, 1262, 1268, 1270, 1272, 1278, 1280, 1282, 1284, 1286, 1288, 1290, 1296, 1302, 1304, 1306, 1308, 1314, 1316, 1318, 1320, 1322, 1324, 1326, 1328, 1330, 1332, 1334, 1336, 1338, 1340, 1342, 1350, 1352, 1358, 1360, 1362, 1364, 1370, 1372, 1378, 1384, 1386, 1392, 1394, 1396, 1398, 1404, 1406, 1412, 1414, 1420, 1426, 1432, 1434, and 1440 corresponding to the human mRNAs generated therefrom), is also provided. Preferably, the method comprises contacting an agent specific for said protein with said protein in an amount sufficient to effect neutralization.

[0020] Moreover, provided herein is a biochip comprising a nucleic acid segment which encodes a CA protein, preferably selected from the sequences outlined in Tables 1-124 (SEQ ID NOS: 5, 11, 17, 19, 21, 27, 33, 47, 49, 51, 53, 55, 61, 63, 65, 71, 81, 83, 85, 87, 89, 97, 99, 101, 103, 105, 107, 109, 115, 117, 119, 121, 123, 125, 127, 129, 138, 140, 142, 144, 146, 148, 154, 156, 158, 160, 162, 164, 166, 168, 174, 176, 178, 180, 188, 190, 192, 194, 196, 198, 200, 202, 204, 210, 212, 214, 216, 218, 224, 230, 236, 238, 244, 246, 248, 250, 256, 262, 268, 270, 272, 274, 276, 282, 284, 286, 288, 294, 296, 298, 304, 306, 312, 314, 316, 322, 324, 326, 328, 330, 332, 342, 344, 346, 348, 350, 352, 354, 360, 368, 370, 376, 384, 386, 388, 390, 392, 398, 400, 402, 408, 414, 416, 418, 420, 428, 430, 432, 434, 436, 438, 440, 442, 444, 450, 456, 458, 464, 466, 468, 474, 476, 482, 484, 486, 492, 494, 500, 508, 510, 516, 522, 528, 530, 532, 534, 536, 542, 548, 550, 556, 558, 564, 566, 568, 570, 572, 574, 576, 578, 580, 582, 584, 586, 588, 590, 592, 594, 596, 598, 600, 602, 604, 606, 608, 610, 612, 614, 616, 618, 620, 622, 624, 626, 628, 630, 632, 634, 644, 646, 652, 654, 660, 662, 664, 670, 672, 674, 676, 682, 684, 686, 688, 690, 692, 694, 696, 698, 700, 702, 704, 706, 708, 710, 716, 718, 724, 726, 728, 730, 732, 734, 736, 744, 750, 752, 754, 760, 776, 778, 780, 782, 788, 794, 796, 798, 800, 806, 812, 818, 824, 826, 828, 834, 840, 842, 844, 846, 852, 854, 856, 862, 864, 866, 872, 874, 880, 882, 884, 886, 888, 890, 892, 894, 900, 902, 910, 912, 918, 920, 922, 931, 933, 939, 941, 943, 945, 951, 953, 955, 957, 959, 961, 967, 969, 977, 979, 981, 983, 985, 991, 993, 995, 997, 1003, 1005, 1017, 1025, 1027, 1029, 1031, 1033, 1035, 1041, 1047, 1049, 1055, 1057, 1059, 1061, 1063, 1069, 1071, 1073, 1075, 1077, 1083, 1089, 1091, 1093, 1103, 1105, 1113, 1115, 1117, 1123, 1125, 1131, 1133, 1135, 1141, 1143, 1145, 1147, 1149, 1152, 1154, 1156, 1158, 1160, 1166, 1168, 1170, 1176, 1178, 1180, 1186, 1188, 1194, 1196, 1198, 1200, 1206, 1212, 1214, 1216, 1218, 1220, 1222, 1224, 1226, 1228, 1230, 1236, 1242, 1244, 1246, 1248, 1250, 1256, 1258, 1260, 1262, 1268, 1270, 1272, 1278, 1280, 1282, 1284, 1286, 1288, 1290, 1296, 1302, 1304, 1306, 1308, 1314, 1316, 1318, 1320, 1322, 1324, 1326, 1328, 1330, 1332, 1334, 1336, 1338, 1340, 1342, 1350, 1352, 1358, 1360, 1362, 1364, 1370, 1372, 1378, 1384, 1386, 1392, 1394, 1396, 1398, 1404, 1406, 1412, 1414, 1420, 1426, 1432, 1434, and 1440).

[0021] Also provided herein is a method for diagnosing or determining the propensity to cancers, especially lymphoma or leukemia or carcinoma by sequencing at least one carcinoma or lymphoma gene of an individual. In yet another aspect of the invention, a method is provided for determining cancer including lymphoma and leukemia gene copy numbers in an individual.

[0022] The invention provides an isolated nucleic acid comprising at least 10, 12, 15, 20 or 30 contiguous nucleotides of a sequence selected from the group consisting of the polynucleotide sequences SEQ ID NOS: 5, 11, 17, 19, 21, 27, 33, 47, 49, 51, 53, 55, 61, 63, 65, 71, 81, 83, 85, 87, 89, 97, 99, 101, 103, 105, 107, 109, 115, 117, 119, 121, 123, 125, 127, 129, 138, 140, 142, 144, 146, 148, 154, 156, 158, 160, 162, 164, 166, 168, 174, 176, 178, 180, 188, 190, 192, 194, 196, 198, 200, 202, 204, 210, 212, 214, 216, 218, 224, 230, 236, 238, 244, 246, 248, 250, 256, 262, 268, 270, 272, 274, 276, 282, 284, 286, 288, 294, 296, 298, 304, 306, 312, 314, 316, 322, 324, 326, 328, 330, 332, 342, 344, 346, 348, 350, 352, 354, 360, 368, 370, 376, 384, 386, 388, 390, 392, 398, 400, 402, 408, 414, 416, 418, 420, 428, 430, 432, 434, 436, 438, 440, 442, 444, 450, 456, 458, 464, 466, 468, 474, 476, 482, 484, 486, 492, 494, 500, 508, 510, 516, 522, 528, 530, 532, 534, 536, 542, 548, 550, 556, 558, 564, 566, 568, 570, 572, 574, 576, 578, 580, 582, 584, 586, 588, 590, 592, 594, 596, 598, 600, 602, 604, 606, 608, 610, 612, 614, 616, 618, 620, 622, 624, 626, 628, 630, 632, 634, 644, 646, 652, 654, 660, 662, 664, 670, 672, 674, 676, 682, 684, 686, 688, 690, 692, 694, 696, 698, 700, 702, 704, 706, 708, 710, 716, 718, 724, 726, 728, 730, 732, 734, 736, 744, 750, 752, 754, 760, 776, 778, 780, 782, 788, 794, 796, 798, 800, 806, 812, 818, 824, 826, 828, 834, 840, 842, 844, 846, 852, 854, 856, 862, 864, 866, 872, 874, 880, 882, 884, 886, 888, 890, 892, 894, 900, 902, 910, 912, 918, 920, 922, 931, 933, 939, 941, 943, 945, 951, 953, 955, 957, 959, 961, 967, 969, 977, 979, 981, 983, 985, 991, 993, 995, 997, 1003, 1005, 1017, 1025, 1027, 1029, 1031, 1033, 1035, 1041, 1047, 1049, 1055, 1057, 1059, 1061, 1063, 1069, 1071, 1073, 1075, 1077, 1083, 1089, 1091, 1093, 1103, 1105, 1113, 1115, 1117, 1123, 1125, 1131, 1133, 1135, 1141, 1143, 1145, 1147, 1149, 1152, 1154, 1156, 1158, 1160, 1166, 1168, 1170, 1176, 1178, 1180, 1186, 1188, 1194, 1196, 1198, 1200, 1206, 1212, 1214, 1216, 1218, 1220, 1222, 1224, 1226, 1228, 1230, 1236, 1242, 1244, 1246, 1248, 1250, 1256, 1258, 1260, 1262, 1268, 1270, 1272, 1278, 1280, 1282, 1284, 1286, 1288, 1290, 1296, 1302, 1304, 1306, 1308, 1314, 1316, 1318, 1320, 1322, 1324, 1326, 1328, 1330, 1332, 1334, 1336, 1338, 1340, 1342, 1350, 1352, 1358, 1360, 1362, 1364, 1370, 1372, 1378, 1384, 1386, 1392, 1394, 1396, 1398, 1404, 1406, 1412, 1414, 1420, 1426, 1432, 1434, and 1440 shown in Tables 1-124, or its complement, or an expression vector comprising the isolated nucleic acids and host cells comprising them.

[0023] In some embodiments, the polynucleotide, or its complement or a fragment thereof, further comprises a detectable label, is attached to a solid support, is prepared at least in part by chemical synthesis, is an antisense fragment, is single stranded, is double stranded or comprises a microarray.

[0024] The invention provides an isolated polypeptide, encoded within an open reading frame of a CA sequence selected from the group consisting of the polynucleotide sequences of SEQ ID NOS: 4, 10, 16, 26, 32, 46, 60, 70, 80, 96, 114, 137, 153, 173, 187, 209, 223, 229, 235, 243, 255, 261, 267, 281, 293, 303, 311, 321, 341, 359, 367, 375, 383, 397, 407, 413, 427, 449, 455, 463, 473, 481, 491, 499, 507, 515, 521, 527, 541, 547, 555, 563, 643, 651, 659, 669, 681, 715, 723, 743, 749, 759, 775, 787, 793, 805, 811, 817, 823, 833, 839, 851, 861, 871, 879, 899, 909, 917, 930, 938, 950, 966, 976, 990, 1002, 1016, 1024, 1040, 1046, 1054, 1068, 1082, 1088, 1102, 1112, 1122, 1130, 1140, 1151, 1165, 1175, 1185, 1193, 1205, 1211, 1235, 1241, 1255, 1267, 1277, 1295, 1301, 1313, 1349, 1357, 1369, 1377, 1383, 1391, 1403, 1411, 1419, 1425, 1431, and 1439 shown in Tables 1-124, or its complement. The invention provides an isolated polypeptide, wherein said polypeptide comprises the amino acid sequence encoded by a polynucleotide selected from the group consisting of SEQ ID NOS: 5, 11, 17, 19, 21, 27, 33, 47, 49, 51, 53, 55, 61, 63, 65, 71, 81, 83, 85, 87, 89, 97, 99, 101, 103, 105, 107, 109, 115, 117, 119, 121, 123, 125, 127, 129, 138, 140, 142, 144, 146, 148, 154, 156, 158, 160, 162, 164, 166, 168, 174, 176, 178, 180, 188, 190, 192, 194, 196, 198, 200, 202, 204, 210, 212, 214, 216, 218, 224, 230, 236, 238, 244, 246, 248, 250, 256, 262, 268, 270, 272, 274, 276, 282, 284, 286, 288, 294, 296, 298, 304, 306, 312, 314, 316, 322, 324, 326, 328, 330, 332, 342, 344, 346, 348, 350, 352, 354, 360, 368, 370, 376, 384, 386, 388, 390, 392, 398, 400, 402, 408, 414, 416, 418, 420, 428, 430, 432, 434, 436, 438, 440, 442, 444, 450, 456, 458, 464, 466, 468, 474, 476, 482, 484, 486, 492, 494, 500, 508, 510, 516, 522, 528, 530, 532, 534, 536, 542, 548, 550, 556, 558, 564, 566, 568, 570, 572, 574, 576, 578, 580, 582, 584, 586, 588, 590, 592, 594, 596, 598, 600, 602, 604, 606, 608, 610, 612, 614, 616, 618, 620, 622, 624, 626, 628, 630, 632, 634, 644, 646, 652, 654, 660, 662, 664, 670, 672, 674, 676, 682, 684, 686, 688, 690, 692, 694, 696, 698, 700, 702, 704, 706, 708, 710, 716, 718, 724, 726, 728, 730, 732, 734, 736, 744, 750, 752, 754, 760, 776, 778, 780, 782, 788, 794, 796, 798, 800, 806, 812, 818, 824, 826, 828, 834, 840, 842, 844, 846, 852, 854, 856, 862, 864, 866, 872, 874, 880, 882, 884, 886, 888, 890, 892, 894, 900, 902, 910, 912, 918, 920, 922, 931, 933, 939, 941, 943, 945, 951, 953, 955, 957, 959, 961, 967, 969, 977, 979, 981, 983, 985, 991, 993, 995, 997, 1003, 1005, 1017, 1025, 1027, 1029, 1031, 1033, 1035, 1041, 1047, 1049, 1055, 1057, 1059, 1061, 1063, 1069, 1071, 1073, 1075, 1077, 1083, 1089, 1091, 1093, 1103, 1105, 1113, 1115, 1117, 1123, 1125, 1131, 1133, 1135, 1141, 1143, 1145, 1147, 1149, 1152, 1154, 1156, 1158,1160,1166, 1168, 1170, 1176, 1178, 1180, 1186, 1188, 1194, 1196, 1198, 1200, 1206, 1212, 1214, 1216, 1218, 1220, 1222, 1224, 1226, 1228, 1230, 1236, 1242, 1244, 1246, 1248, 1250, 1256, 1258, 1260, 1262, 1268, 1270, 1272, 1278, 1280, 1282, 1284, 1286, 1288, 1290, 1296, 1302, 1304, 1306, 1308, 1314, 1316, 1318, 1320, 1322, 1324, 1326, 1328, 1330, 1332, 1334, 1336, 1338, 1340, 1342, 1350, 1352, 1358, 1360, 1362, 1364, 1370, 1372, 1378, 1384, 1386, 1392, 1394, 1396, 1398, 1404, 1406, 1412, 1414, 1420, 1426, 1432, 1434, and 1440 shown in Tables 1-124. The invention provides an isolated polypeptide, wherein said polypeptide comprises the amino acid sequence encoded by a polypeptide selected from the group consisting of SEQ ID NOS: 6, 12, 18, 20, 22, 28, 34, 48, 50, 52, 54, 56, 62, 64, 66, 72, 82, 84, 86, 88, 90, 98, 100, 102, 104, 106, 108, 110, 116, 118, 120, 122, 124, 126, 128, 130, 139, 141, 143, 145, 147, 149, 155, 157, 159, 161, 163, 165, 167, 169, 175, 177, 179, 181, 189, 191, 193, 195, 197, 199, 201, 203, 205, 211, 213,215,217,219,225, 231, 237, 239, 245, 247, 249, 251, 257, 263, 269, 271, 273, 275, 277, 283, 285, 287, 289, 295, 297, 299, 305, 307, 313, 315, 317, 323, 325, 327, 329, 331, 333, 343, 345, 347, 349, 351, 353, 355, 361, 369, 371, 377, 385, 387, 389, 391, 393, 399, 401, 403, 409, 415, 417, 419, 421, 429, 431, 433, 435, 437, 439, 441, 443, 445, 451, 457, 459, 465, 467, 469, 475, 477, 483, 485, 487, 493, 495, 501, 509, 511, 517, 523, 529, 531, 533, 535, 537, 543, 549, 551, 557, 559, 565, 567, 569, 571, 573, 575, 577, 579, 581, 583, 585, 587, 589, 591, 593, 595, 597, 599, 601, 603, 605, 607, 609, 611, 613, 615, 617, 619, 621, 623, 625, 627, 629, 631, 633, 635, 645, 647, 653, 655, 661, 663, 665, 671, 673, 675, 677, 683, 685, 687, 689, 691, 693, 695, 697, 699, 701, 703, 705, 707, 709, 711, 717, 719, 725, 727, 729, 731, 733, 735, 737, 745, 751, 753, 755, 761, 777, 779, 781, 783, 789, 795, 797, 799, 801, 807, 813, 819, 825, 827, 829, 835, 841, 843, 845, 847, 853, 855, 857, 863, 865, 867, 873, 875, 881, 883, 885, 887, 889, 891, 893, 895, 901, 903, 911, 913, 919, 921, 923, 932, 934, 940, 942, 944, 946, 952, 954, 956, 958, 960, 962, 968, 970, 978, 980, 982, 984, 986, 992, 994, 996, 998, 1004, 1006, 1018, 1026, 1028, 1030, 1032, 1034, 1036, 1042, 1048, 1050, 1056, 1058, 1060, 1062, 1064, 1070, 1072, 1074, 1076, 1078, 1084, 1090, 1092, 1094, 1104, 1106, 1114, 1116, 1118, 1124, 1126, 1132, 1134, 1136, 1142, 1144, 1146, 1148, 1150, 1153, 1155, 1157, 1159, 1161, 1167, 1169, 1171, 1177, 1179, 1181, 1187, 1189, 1195, 1197, 1199, 1201, 1207, 1213, 1215, 1217, 1219, 1221, 1223, 1225, 1227, 1229, 1231, 1237, 1243, 1245, 1247, 1249, 1251, 1257, 1259, 1261, 1263, 1269, 1271, 1273, 1279, 1281, 1283, 1285, 1287, 1289, 1291, 1297, 1303, 1305, 1307, 1309, 1315, 1317, 1319, 1321, 1323, 1325, 1327, 1329, 1331, 1333, 1335, 1337, 1339, 1341, 1343, 1351, 1353, 1359, 1361, 1363, 1365, 1371, 1373, 1379, 1385, 1387, 1393, 1395, 1397, 1399, 1405, 1407, 1413, 1415, 1421, 1427, 1433, 1435, and 1441 shown in Tables 1-124.

[0025] The invention further provides an isolated polypeptide, comprising the amino acid sequence of an epitope of the amino acid sequence of a CA polypeptide selected from the group consisting of SEQ ID NOS: 6, 12, 18, 20, 22, 28, 34, 48, 50, 52, 54, 56, 62, 64, 66, 72, 82, 84, 86, 88, 90, 98, 100, 102, 104, 106, 108, 110, 116, 118, 120, 122, 124, 126, 128, 130, 139, 141, 143, 145, 147, 149, 155, 157, 159, 161, 163, 165, 167, 169, 175, 177, 179, 181, 189, 191, 193, 195, 197, 199, 201, 203, 205, 211, 213, 215, 217, 219, 225, 231, 237, 239, 245, 247, 249, 251, 257, 263, 269, 271, 273, 275, 277, 283, 285, 287, 289, 295, 297, 299, 305, 307, 313, 315, 317, 323, 325, 327, 329, 331, 333, 343, 345, 347, 349, 351, 353, 355, 361, 369, 371, 377, 385, 387, 389, 391, 393, 399, 401, 403, 409, 415, 417, 419, 421, 429, 431, 433, 435, 437, 439, 441, 443, 445, 451, 457, 459, 465, 467, 469, 475, 477, 483, 485, 487, 493, 495, 501, 509, 511, 517, 523, 529, 531, 533, 535, 537, 543, 549, 551, 557, 559, 565, 567, 569, 571, 573, 575, 577, 579, 581, 583, 585, 587, 589, 591, 593, 595, 597, 599, 601, 603, 605, 607, 609, 611, 613, 615, 617, 619, 621, 623, 625, 627, 629, 631, 633, 635, 645, 647, 653, 655, 661, 663, 665, 671, 673, 675, 677, 683, 685, 687, 689, 691, 693, 695, 697, 699, 701, 703, 705, 707, 709, 711, 717, 719, 725, 727, 729, 731, 733, 735, 737, 745, 751, 753, 755, 761, 777, 779, 781, 783, 789, 795, 797, 799, 801, 807, 813, 819, 825, 827, 829, 835, 841, 843, 845, 847, 853, 855, 857, 863, 865, 867, 873, 875, 881, 883, 885, 887, 889, 891, 893, 895, 901, 903, 911, 913, 919, 921, 923, 932, 934, 940, 942, 944, 946, 952, 954, 956, 958, 960, 962, 968, 970, 978, 980, 982, 984, 986, 992, 994, 996, 998, 1004, 1006, 1018, 1026, 1028, 1030, 1032, 1034, 1036, 1042, 1048, 1050, 1056, 1058, 1060, 1062, 1064, 1070, 1072, 1074, 1076, 1078, 1084, 1090, 1092, 1094, 1104, 1106, 1114, 1116, 1118, 1124, 1126, 1132, 1134, 1136, 1142, 1144, 1146, 1148, 1150, 1153, 1155, 1157, 1159, 1161, 1167, 1169,1171, 1177, 1179, 1181, 1187, 1189, 1195, 1197, 1199, 1201, 1207, 1213, 1215, 1217, 1219, 1221, 1223, 1225, 1227, 1229, 1231, 1237, 1243, 1245, 1247, 1249, 1251, 1257, 1259, 1261, 1263, 1269, 1271, 1273, 1279, 1281, 1283, 1285, 1287, 1289, 1291, 1297, 1303, 1305, 1307, 1309, 1315, 1317, 1319, 1321, 1323, 1325, 1327, 1329, 1331, 1333, 1335, 1337, 1339, 1341, 1343, 1351, 1353, 1359, 1361, 1363, 1365, 1371, 1373, 1379, 1385, 1387, 1393, 1395, 1397, 1399, 1405, 1407, 1413, 1415, 1421, 1427, 1433, 1435, and 1441 shown in Tables 1-124, wherein the polypeptide or fragment thereof may be attached to a solid support. In one embodiment the invention provides an isolated antibody (monoclonal or polyclonal) or antigen binding fragment thereof, that binds to such a polypeptide. The isolated antibody or antigen binding fragment thereof may be attached to a solid support, or further comprises a detectable label.

[0026] In one embodiment, the invention provides a kit for diagnosing the presence of cancer in a test sample, said kit comprising at least one polynucleotide that selectively hybridizes to a CA polynucleotide sequence shown in Tables 1-124, or its complement. In another embodiment. the invention provides an electronic library comprising a CA polynucleotide, a CA polypeptide, or fragment thereof, shown in Tables 1-124.

[0027] In one embodiment, the invention provides a method of screening for anticancer activity comprising: (a) providing a cell that expresses a cancer associated (CA) gene encoded by a nucleic acid sequence selected from the group consisting of the CA sequences shown in Tables 1-124, or fragment thereof; (b) contacting a tissue sample derived from a cancer cell with an anticancer drug candidate; (c) monitoring an effect of the anticancer drug candidate on an expression of the CA polynucleotide in the tissue sample, and optionally (d) comparing the level of expression in the absence of said drug candidate to the level of expression in the presence of the drug candidate. The drug candidate may be an inhibitor of transcription, a G-protein coupled receptor antagonist, a growth factor antagonist, a serine-threonine kinase antagonist, a tyrosine kinase antagonist.

[0028] In one embodiment, the invention provides a method for detecting cancer associated with expression of a polypeptide in a test cell sample, comprising the steps of: (i) detecting a level of expression of at least one polypeptide selected from the group consisting of SEQ ID NOS: 6, 12, 18, 20, 22, 28, 34, 48, 50, 52, 54, 56, 62, 64, 66, 72, 82, 84, 86, 88, 90, 98, 100, 102, 104, 106, 108, 110, 116, 118, 120, 122, 124, 126, 128, 130, 139, 141, 143, 145, 147, 149, 155, 157, 159, 161, 163, 165, 167, 169, 175, 177, 179, 181, 189, 191, 193, 195, 197, 199, 201, 203, 205, 211, 213, 215, 217, 219, 225, 231, 237, 239, 245, 247, 249, 251, 257, 263, 269, 271, 273, 275, 277, 283, 285, 287, 289, 295, 297, 299, 305, 307, 313, 315, 317, 323, 325, 327, 329, 331, 333, 343, 345, 347, 349, 351, 353, 355, 361, 369, 371, 377, 385, 387, 389, 391, 393, 399, 401, 403, 409, 415, 417, 419, 421, 429, 431, 433, 435, 437, 439, 441, 443, 445, 451, 457, 459, 465, 467, 469, 475, 477, 483, 485, 487, 493, 495, 501, 509, 511, 517, 523, 529, 531, 533, 535, 537, 543, 549, 551, 557, 559, 565, 567, 569, 571, 573, 575, 577, 579, 581, 583, 585, 587, 589, 591, 593, 595, 597, 599, 601, 603, 605, 607, 609, 611, 613, 615, 617, 619, 621, 623, 625, 627, 629, 631, 633, 635, 645, 647, 653, 655, 661, 663, 665, 671, 673, 675, 677, 683, 685, 687, 689, 691, 693, 695, 697, 699, 701, 703, 705, 707, 709, 711, 717, 719, 725, 727, 729, 731, 733, 735, 737, 745, 751, 753, 755, 761, 777, 779, 781, 783, 789, 795, 797, 799, 801, 807, 813, 819, 825, 827, 829, 835, 841, 843, 845, 847, 853, 855, 857, 863, 865, 867, 873, 875, 881, 883, 885, 887, 889, 891, 893, 895, 901, 903, 911, 913, 919, 921, 923, 932, 934, 940, 942, 944, 946, 952, 954, 956, 958, 960, 962, 968, 970, 978, 980, 982, 984, 986, 992, 994, 996, 998, 1004, 1006, 1018, 1026, 1028, 1030, 1032, 1034, 1036, 1042, 1048, 1050, 1056, 1058, 1060, 1062, 1064, 1070, 1072, 1074, 1076, 1078, 1084, 1090, 1092, 1094, 1104, 1106, 1114, 1116, 1118, 1124, 1126, 1132, 1134, 1136, 1142, 1144, 1146, 1148, 1150, 1153, 1155, 1157, 1159, 1161, 1167, 1169, 1171, 1177, 1179, 1181, 1187, 1189, 1195, 1197, 1199, 1201, 1207, 1213, 1215, 1217, 1219, 1221, 1223, 1225, 1227, 1229, 1231, 1237, 1243, 1245, 1247, 1249, 1251, 1257, 1259, 1261, 1263, 1269, 1271, 1273, 1279, 1281, 1283, 1285, 1287, 1289, 1291, 1297, 1303, 1305, 1307, 1309, 1315, 1317, 1319, 1321, 1323, 1325, 1327, 1329, 1331, 1333, 1335, 1337, 1339, 1341, 1343, 1351, 1353, 1359, 1361, 1363, 1365, 1371, 1373, 1379, 1385, 1387, 1393, 1395, 1397, 1399, 1405, 1407, 1413, 1415, 1421, 1427, 1433, 1435, and 1441 shown in Tables 1-124, or a fragment thereof; and (ii) comparing the level of expression of the polypeptide in the test sample with a level of expression of polypeptide in a normal cell sample, wherein an altered level of expression of the polypeptide in the test cell sample relative to the level of polypeptide expression in the normal cell sample is indicative of the presence of cancer in the test cell sample.

[0029] In another embodiment, the invention provides a method for detecting cancer associated with expression of a polypeptide in a test cell sample, comprising the steps of: (i) detecting a level of activity of at least one polypeptide selected from the group consisting of SEQ ID NOS: 6, 12, 18, 20, 22, 28, 34, 48, 50, 52, 54, 56, 62, 64, 66, 72, 82, 84, 86, 88, 90, 98, 100, 102, 104, 106, 108, 110, 116, 118, 120, 122, 124, 126, 128, 130, 139, 141, 143, 145, 147, 149, 155, 157, 159, 161, 163, 165, 167, 169, 175, 177, 179, 181, 189, 191, 193, 195, 197, 199, 201, 203, 205, 211, 213, 215, 217, 219, 225, 231, 237, 239, 245, 247, 249, 251, 257, 263, 269, 271, 273, 275, 277, 283, 285, 287, 289, 295, 297, 299, 305, 307, 313, 315, 317, 323, 325, 327, 329, 331, 333, 343, 345, 347, 349, 351, 353, 355, 361, 369, 371, 377, 385, 387, 389, 391, 393, 399, 401, 403, 409, 415, 417, 419, 421, 429, 431, 433, 435, 437, 439, 441, 443, 445, 451, 457, 459, 465, 467, 469, 475, 477, 483, 485, 487, 493, 495, 501, 509, 511, 517, 523, 529, 531, 533, 535, 537, 543, 549, 551, 557, 559, 565, 567, 569, 571, 573, 575, 577, 579, 581, 583, 585, 587, 589, 591, 593, 595, 597, 599, 601, 603, 605, 607, 609, 611, 613, 615, 617, 619, 621, 623, 625, 627, 629, 631, 633, 635, 645, 647, 653, 655, 661, 663, 665, 671, 673, 675, 677, 683, 685, 687, 689, 691, 693, 695, 697, 699, 701, 703, 705, 707, 709, 711, 717, 719, 725, 727, 729, 731, 733, 735, 737, 745, 751, 753, 755, 761, 777, 779, 781, 783, 789, 795, 797, 799, 801, 807, 813, 819, 825, 827, 829, 835, 841, 843, 845, 847, 853, 855, 857, 863, 865, 867, 873, 875, 881, 883, 885, 887, 889, 891, 893, 895, 901, 903, 911, 913, 919, 921, 923, 932, 934, 940, 942, 944, 946, 952, 954, 956, 958, 960, 962, 968, 970, 978, 980, 982, 984, 986, 992, 994, 996, 998, 1004, 1006, 1018, 1026, 1028, 1030, 1032, 1034, 1036, 1042, 1048, 1050, 1056, 1058, 1060, 1062, 1064, 1070, 1072, 1074, 1076, 1078, 1084, 1090, 1092, 1094, 1104, 1106, 1114, 1116, 1118, 1124, 1126, 1132, 1134, 1136, 1142, 1144, 1146, 1148, 1150, 1153, 1155, 1157, 1159, 1161, 1167, 1169, 1171, 1177, 1179, 1181, 1187, 1189, 1195, 1197, 1199, 1201, 1207, 1213, 1215, 1217, 1219, 1221, 1223, 1225, 1227, 1229, 1231, 1237, 1243, 1245, 1247, 1249, 1251, 1257, 1259, 1261, 1263, 1269, 1271, 1273, 1279, 1281, 1283, 1285, 1287, 1289, 1291, 1297, 1303, 1305, 1307, 1309, 1315, 1317, 1319, 1321, 1323, 1325, 1327, 1329, 1331, 1333, 1335, 1337, 1339, 1341, 1343, 1351, 1353, 1359, 1361, 1363, 1365, 1371, 1373, 1379, 1385, 1387, 1393, 1395, 1397, 1399, 1405, 1407, 1413, 1415, 1421, 1427, 1433, 1435, and 1441 shown in Tables 1-124, or a fragment thereof, wherein said activity corresponds to at least one activity for the polypeptide listed in Tables 1-124; and (ii) comparing the level of activity of the polypeptide in the test sample with a level of activity of polypeptide in a normal cell sample, wherein an altered level of activity of the polypeptide in the test cell sample relative to the level of polypeptide activity in the normal cell sample is indicative of the presence of cancer in the test cell sample.

[0030] In another embodiment, the invention provides a method for detecting cancer associated with the presence of an antibody in a test serum sample, comprising the steps of: (i) detecting a level of an antibody against an antigenic polypeptide selected from the group consisting of SEQ ID NOS: 6, 12, 18, 20, 22, 28, 34, 48, 50, 52, 54, 56, 62, 64, 66, 72, 82, 84, 86, 88, 90, 98, 100, 102, 104, 106, 108, 110, 116, 118, 120, 122, 124, 126, 128, 130, 139, 141, 143, 145, 147, 149, 155, 157, 159, 161, 163, 165, 167, 169, 175, 177, 179, 181, 189, 191, 193, 195, 197, 199, 201, 203, 205, 211, 213, 215, 217, 219, 225, 231, 237, 239, 245, 247, 249, 251, 257, 263, 269, 271, 273, 275, 277, 283, 285, 287, 289, 295, 297, 299, 305, 307, 313, 315, 317, 323, 325, 327, 329, 331, 333, 343, 345, 347, 349, 351, 353, 355, 361, 369, 371, 377, 385, 387, 389, 391, 393, 399, 401, 403, 409, 415, 417, 419, 421, 429, 431, 433, 435, 437, 439, 441, 443, 445, 451, 457, 459, 465, 467, 469, 475, 477, 483, 485, 487, 493, 495, 501, 509, 511, 517, 523, 529, 531, 533, 535, 537, 543, 549, 551, 557, 559, 565, 567, 569, 571, 573, 575, 577, 579, 581, 583, 585, 587, 589, 591, 593, 595, 597, 599, 601, 603, 605, 607, 609, 611, 613, 615, 617, 619, 621, 623, 625, 627, 629, 631, 633, 635, 645, 647, 653, 655, 661, 663, 665, 671, 673, 675, 677, 683, 685, 687, 689, 691, 693, 695, 697, 699, 701, 703, 705, 707, 709, 711, 717, 719, 725, 727, 729, 731, 733, 735, 737, 745, 751, 753, 755, 761, 777, 779, 781, 783, 789, 795, 797, 799, 801, 807, 813, 819, 825, 827, 829, 835, 841, 843, 845, 847, 853, 855, 857, 863, 865, 867, 873, 875, 881, 883, 885, 887, 889, 891, 893, 895, 901, 903, 911, 913, 919, 921, 923, 932, 934, 940, 942, 944, 946, 952, 954, 956, 958, 960, 962, 968, 970, 978, 980, 982, 984, 986, 992, 994, 996, 998, 1004, 1006, 1018, 1026, 1028, 1030, 1032, 1034, 1036, 1042, 1048, 1050, 1056, 1058, 1060, 1062, 1064, 1070, 1072, 1074, 1076, 1078, 1084, 1090, 1092, 1094, 1104, 1106, 1114, 1116, 1118, 1124, 1126, 1132, 1134, 1136, 1142, 1144, 1146, 1148, 1150, 1153, 1155, 1157, 1159, 1161, 1167, 1169, 1171, 1177, 1179, 1181, 1187, 1189, 1195, 1197, 1199, 1201, 1207, 1213, 1215, 1217, 1219, 1221, 1223, 1225, 1227, 1229, 1231, 1237, 1243, 1245, 1247, 1249, 1251, 1257, 1259, 1261, 1263, 1269, 1271, 1273, 1279, 1281, 1283, 1285, 1287, 1289, 1291, 1297, 1303, 1305, 1307, 1309, 1315, 1317, 1319, 1321, 1323, 1325, 1327, 1329, 1331, 1333, 1335, 1337, 1339, 1341, 1343, 1351, 1353, 1359, 1361, 1363, 1365, 1371, 1373, 1379, 1385, 1387, 1393, 1395, 1397, 1399, 1405, 1407, 1413, 1415, 1421, 1427, 1433, 1435, and 1441 shown in Tables 1-124, or antigenic fragment thereof; and (ii) comparing said level of said antibody in the test sample with a level of said antibody in the control sample, wherein an altered level of antibody in said test sample relative to the level of antibody in the control sample is indicative of the presence of cancer in the test serum sample.

[0031] The invention provides a method for screening for a bioactive agent capable of modulating the activity of a CA protein (CAP), wherein said CAP is encoded by a nucleic acid comprising a nucleic acid sequence selected from the group consisting of the polynucleotide sequences SEQ ID NOS: 5, 11, 17, 19, 21, 27, 33, 47, 49, 51, 53, 55, 61, 63, 65, 71, 81, 83, 85, 87, 89, 97, 99, 101, 103, 105, 107, 109, 115, 117, 119, 121, 123, 125, 127, 129, 138, 140, 142, 144, 146, 148, 154, 156, 158, 160, 162, 164, 166, 168, 174, 176, 178, 180, 188, 190, 192, 194, 196, 198, 200, 202, 204, 210, 212, 214, 216, 218, 224, 230, 236, 238, 244, 246, 248, 250, 256, 262, 268, 270, 272, 274, 276, 282, 284, 286, 288, 294, 296, 298, 304, 306, 312, 314, 316, 322, 324, 326, 328, 330, 332, 342, 344, 346, 348, 350, 352, 354, 360, 368, 370, 376, 384, 386, 388, 390, 392, 398, 400, 402, 408, 414, 416, 418, 420, 428, 430, 432, 434, 436, 438, 440, 442, 444, 450, 456, 458, 464, 466, 468, 474, 476, 482, 484, 486, 492, 494, 500, 508, 510, 516, 522, 528, 530, 532, 534, 536, 542, 548, 550, 556, 558, 564, 566, 568, 570, 572, 574, 576, 578, 580, 582, 584, 586, 588, 590, 592, 594, 596, 598, 600, 602, 604, 606, 608, 610, 612, 614, 616, 618, 620, 622, 624, 626, 628, 630, 632, 634, 644, 646, 652, 654, 660, 662, 664, 670, 672, 674, 676, 682, 684, 686, 688, 690, 692, 694, 696, 698, 700, 702, 704, 706, 708, 710, 716, 718, 724, 726, 728, 730, 732, 734, 736, 744, 750, 752, 754, 760, 776, 778, 780, 782, 788, 794, 796, 798, 800, 806, 812, 818, 824, 826, 828, 834, 840, 842, 844, 846, 852, 854, 856, 862, 864, 866, 872, 874, 880, 882, 884, 886, 888, 890, 892, 894, 900, 902, 910, 912, 918, 920, 922, 931, 933, 939, 941, 943, 945, 951, 953, 955, 957, 959, 961, 967, 969, 977, 979, 981, 983, 985, 991, 993, 995, 997, 1003, 1005, 1017, 1025, 1027, 1029, 1031, 1033, 1035, 1041, 1047, 1049, 1055, 1057, 1059, 1061, 1063, 1069, 1071, 1073, 1075, 1077, 1083, 1089, 1091, 1093, 1103, 1105, 1113, 1115, 1117, 1123, 1125, 1131, 1133, 1135, 1141, 1143, 1145, 1147, 1149, 1152, 1154, 1156, 1158, 1160, 1166, 1168, 1170, 1176, 1178, 1180, 1186, 1188, 1194, 1196, 1198, 1200, 1206, 1212, 1214, 1216, 1218, 1220, 1222, 1224, 1226, 1228, 1230, 1236, 1242, 1244, 1246, 1248, 1250, 1256, 1258, 1260, 1262, 1268, 1270, 1272, 1278, 1280, 1282, 1284, 1286, 1288, 1290, 1296, 1302, 1304, 1306, 1308, 1314, 1316, 1318, 1320, 1322, 1324, 1326, 1328, 1330, 1332, 1334, 1336, 1338, 1340, 1342, 1350, 1352, 1358, 1360, 1362, 1364, 1370, 1372, 1378, 1384, 1386, 1392, 1394, 1396, 1398, 1404, 1406, 1412, 1414, 1420, 1426, 1432, 1434, and 1440 shown in Tables 1-124, said method comprising: a) combining said CAP and a candidate bioactive agent; and b) determining the effect of the candidate agent on the bioactivity of said CAP. According to the method the bioactive agent: affects the expression of the CA protein (CAP); affects the activity of the CA protein (CAP), wherein such activity is selected from the activities listed in Tables 1-124.

[0032] In one embodiment, the invention provides a method for diagnosing cancer comprising: a) determining the expression of one or more genes comprising a nucleic acid sequence selected from the group consisting of the human genomic and mRNA sequences outlined in Tables 1-124, in a first tissue type of a first individual; and b) comparing said expression of said gene(s) from a second normal tissue type from said first individual or a second unaffected individual; wherein a difference in said expression indicates that the first individual has cancer.

[0033] In another embodiment the invention provides a method for treating cancers comprising administering to a patient a bioactive agent modulating the activity of a CA protein (CAP), wherein said CAP is encoded by a nucleic acid comprising a nucleic acid sequence selected from the group consisting of the human nucleic acid sequences in Tables 1-124 and further wherein the bioactive agent binds to the CA protein; wherein the CA protein has a sequence shown in Tables 1-124 and has an activity selected from the group consisting of; tumor suppressor, low density lipoprotein receptor, G protein coupled receptor, apoptosis inhibitor, ion transport, calcium binding, cell adhesion, signalling, protein kinase receptor, signal transduction and any other activity disclosed in Tables 1-124.

[0034] The invention provides monoclonal antibodies that preferentially binds to a CA protein (CAP) that is expressed on a cell surface, wherein the CA protein selected from the group consisting of SEQ ID NOS: 6, 12, 18, 20, 22, 28, 34, 48, 50, 52, 54, 56, 62, 64, 66, 72, 82, 84, 86, 88, 90, 98, 100, 102, 104, 106, 108, 110, 116, 118, 120, 122, 124, 126, 128, 130, 139, 141, 143, 145, 147, 149, 155, 157, 159, 161, 163, 165, 167, 169, 175, 177, 179, 181, 189, 191, 193, 195, 197, 199, 201, 203, 205, 211, 213, 215, 217, 219, 225, 231, 237, 239, 245, 247, 249, 251, 257, 263, 269, 271, 273, 275, 277, 283, 285, 287, 289, 295, 297, 299, 305, 307, 313, 315, 317, 323, 325, 327, 329, 331, 333, 343, 345, 347, 349, 351, 353, 355, 361, 369, 371, 377, 385, 387, 389, 391, 393, 399, 401, 403, 409, 415, 417, 419, 421, 429, 431, 433, 435, 437, 439, 441, 443, 445, 451, 457, 459, 465, 467, 469, 475, 477, 483, 485, 487, 493, 495, 501, 509, 511, 517, 523, 529, 531, 533, 535, 537, 543, 549, 551, 557, 559, 565, 567, 569, 571, 573, 575, 577, 579, 581, 583, 585, 587, 589, 591, 593, 595, 597, 599, 601, 603, 605, 607, 609, 611, 613, 615, 617, 619, 621, 623, 625, 627, 629, 631, 633, 635, 645, 647, 653, 655, 661, 663, 665, 671, 673, 675, 677, 683, 685, 687, 689, 691, 693, 695, 697, 699, 701, 703, 705, 707, 709, 711, 717, 719, 725, 727, 729, 731, 733, 735, 737, 745, 751, 753, 755, 761, 777, 779, 781, 783, 789, 795, 797, 799, 801, 807, 813, 819, 825, 827, 829, 835, 841, 843, 845, 847, 853, 855, 857, 863, 865, 867, 873, 875, 881, 883, 885, 887, 889, 891, 893, 895, 901, 903, 911, 913, 919, 921, 923, 932, 934, 940, 942, 944, 946, 952, 954, 956, 958, 960, 962, 968, 970, 978, 980, 982, 984, 986, 992, 994, 996, 998, 1004, 1006, 1018, 1026, 1028, 1030, 1032, 1034, 1036, 1042, 1048, 1050, 1056, 1058, 1060, 1062, 1064, 1070, 1072, 1074, 1076, 1078, 1084, 1090, 1092, 1094, 1104, 1106, 1114, 1116, 1118, 1124, 1126, 1132, 1134, 1136, 1142, 1144, 1146, 1148, 1150, 1153, 1155, 1157, 1159, 1161, 1167, 1169, 1171, 1177, 1179, 1181, 1187, 1189, 1195, 1197, 1199, 1201, 1207, 1213, 1215, 1217, 1219, 1221, 1223, 1225, 1227, 1229, 1231, 1237, 1243, 1245, 1247, 1249, 1251, 1257, 1259, 1261, 1263, 1269, 1271, 1273, 1279, 1281, 1283, 1285, 1287, 1289, 1291, 1297, 1303, 1305, 1307, 1309, 1315, 1317, 1319, 1321, 1323, 1325, 1327, 1329, 1331, 1333, 1335, 1337, 1339, 1341, 1343, 1351, 1353, 1359, 1361, 1363, 1365, 1371, 1373, 1379, 1385, 1387, 1393, 1395, 1397, 1399, 1405, 1407, 1413, 1415, 1421, 1427, 1433, 1435, and 1441; preferably to the extracellular domain of the CA protein; preferably to a CA protein differentially expressed on a cancer cell surface relative to a normal cell surface or preferably to at least one human cancer cell line; preferably linked to a therapeutic agent; or preferably humanized. Kits and pharmaceutical compositions for detecting a presence or an absence of cancer cells in an individual, and comprising such antibodies are also provided.

[0035] The invention also provides a method for detecting a presence or an absence of cancer cells in an individual, the method comprising: contacting cells from the individual with the antibody according to the invention; and detecting a complex of a CAP from the cancer cells and the antibody, wherein detection of the complex correlates with the presence of cancer cells in the individual. In one embodiment the invention provides a method for inhibiting growth of cancer cells in an individual, the method comprising: administering to the individual an effective amount of a pharmaceutical composition according to the invention. In another embodiment the invention provides a method for delivering a therapeutic agent to cancer cells in an individual, the method comprising: administering to the individual an effective amount of a pharmaceutical composition according to according to the invention.

[0036] Novel sequences associated with cancer are also provided herein. Other aspects of the invention will become apparent to the skilled artisan by the following description of the invention.

### BRIEF DESCRIPTION OF THE FIGURES

[0037] FIG. 1 depicts PCR amplification of host-provirus junction fragments.

[0038] FIG. 2 shows an example of average threshold cycle (C_{T}) values for a housekeeper gene and target gene.

[0039] FIG. 3 shows an example of the calculated difference (ΔΔC_{T}) between the C_{T} values of target and housekeeper genes (ΔC_{T}) for various samples.

[0040] FIG. 4 shows the ΔΔC_{T} and comparative expression level for each sample from FIG. 3.

### DETAILED DESCRIPTION OF PREFERRED EMBODIMENTS

[0041] The present invention is directed to a number of sequences associated with cancers, especially lymphoma, breast cancer or prostate cancer. The relatively tight linkage between clonally-integrated proviruses and protooncogenes forms “provirus tagging”, in which slow-transforming retroviruses that act by an insertion mutation mechanism are used to isolate protooncogenes. In some models, uninfected animals have low cancer rates, and infected animals have high cancer rates. It is known that many of the retroviruses involved do not carry transduced host protooncogenes or pathogenic trans-acting viral genes, and thus the cancer incidence must therefore be a direct consequence of proviral integration effects into host protooncogenes. Since proviral integration is random, rare integrants will “activate” host protooncogenes that provide a selective growth advantage, and these rare events result in new proviruses at clonal stoichiometries in tumors. In contrast to mutations caused by chemicals, radiation, or spontaneous errors, protooncogene insertion mutations can be easily located by virtue of the fact that a convenient-sized genetic marker of known sequence (the provirus) is present at the site of mutation. Host sequences that flank clonally integrated proviruses can be cloned using a variety of strategies. Once these sequences are in hand, the tagged protooncogenes can be subsequently identified. The presence of provirus at the same locus in two or more independent tumors is prima facie evidence that a protooncogene is present at or very near the provirus integration sites. This is because the genome is too large for random integrations to result in observable clustering. Any clustering that is detected is unequivocal evidence for biological selection (i.e. the tumor phenotype). Moreover, the pattern of proviral integrants (including orientations) provides compelling positional information that makes localization of the target gene at each cluster relatively simple. The three mammalian retroviruses that are known to cause cancer by an insertion mutation mechanism are FeLV (leukemia/lymphoma in cats), MLV (leukemia/lymphoma in mice and rats), and MMTV (mammary cancer in mice).

[0042] Thus, the use of oncogenic retroviruses, whose sequences insert into the genome of the host organism resulting in cancer, allows the identification of host sequences involved in cancer. These sequences may then be used in a number of different ways, including diagnosis, prognosis, screening for modulators (including both agonists and antagonists), antibody generation (for immunotherapy and imaging), etc. However, as will be appreciated by those in the art, oncogenes that are identified in one type of cancer such as lymphoma or leukemia have a strong likelihood of being involved in other types of cancers as well. Thus, while the sequences outlined herein are initially identified as correlated with lymphoma, they can also be found in other types of cancers as well, outlined below.

Definitions

[0043] Accordingly, the present invention provides nucleic acid and protein sequences that are associated with cancer, herein termed “cancer associated” or “CA” sequences. In one embodiment, the present invention provides nucleic acid and protein sequences that are associated with cancers that originate in lymphatic tissue, herein termed “lymphoma associated,” “leukemia associated” or “LA” sequences. In another embodiment, the present invention provides nucleic acid and protein sequences that are associated with carcinomas which originate in breast tissue, herein termed “breast cancer associated” or “BC” sequences.

[0044] Suitable cancers that can be diagnosed or screened for using the methods of the present invention include cancers classified by site or by histological type. Cancers classified by site include cancer of the oral cavity and pharynx (lip, tongue, salivary gland, floor of mouth, gum and other mouth, nasopharynx, tonsil, oropharynx, hypopharynx, other oral/pharynx); cancers of the digestive system (esophagus; stomach; small intestine; colon and rectum; anus, anal canal, and anorectum; liver; intrahepatic bile duct; gallbladder; other biliary; pancreas; retroperitoneum; peritoneum, omentum, and mesentery; other digestive); cancers of the respiratory system (nasal cavity, middle ear, and sinuses; larynx; lung and bronchus; pleura; trachea, mediastinum, and other respiratory); cancers of the mesothelioma; bones and joints; and soft tissue, including heart; skin cancers, including melanomas and other non-epithelial skin cancers; Kaposi's sarcoma and breast cancer; cancer of the female genital system (cervix uteri; corpus uteri; uterus, nos; ovary; vagina; vulva; and other female genital); cancers of the male genital system (prostate gland; testis; penis; and other male genital); cancers of the urinary system (urinary bladder; kidney and renal pelvis; ureter; and other urinary); cancers of the eye and orbit; cancers of the brain and nervous system (brain; and other nervous system); cancers of the endocrine system (thyroid gland and other endocrine, including thymus); lymphomas (Hodgkin's disease and non-Hodgkin's lymphoma), multiple myeloma, and leukemias (lymphocytic leukemia; myeloid leukemia; monocytic leukemia; and other leukemias).

[0045] Other cancers, classified by histological type, that may be associated with the sequences of the invention include, but are not limited to, Neoplasm, malignant; Carcinoma, NOS; Carcinoma, undifferentiated, NOS; Giant and spindle cell carcinoma; Small cell carcinoma, NOS; Papillary carcinoma, NOS; Squamous cell carcinoma, NOS; Lymphoepithelial carcinoma; Basal cell carcinoma, NOS; Pilomatrix carcinoma; Transitional cell carcinoma, NOS; Papillary transitional cell carcinoma; Adenocarcinoma, NOS; Gastrinoma, malignant; Cholangiocarcinoma; Hepatocellular carcinoma, NOS; Combined hepatocellular carcinoma and cholangiocarcinoma; Trabecular adenocarcinoma; Adenoid cystic carcinoma; Adenocarcinoma in adenomatous polyp; Adenocarcinoma, familial polyposis coli; Solid carcinoma, NOS; Carcinoid tumor, malignant; Bronchiolo-alveolar adenocarcinoma; Papillary adenocarcinoma, NOS; Chromophobe carcinoma; Acidophil carcinoma; Oxyphilic adenocarcinoma; Basophil carcinoma; Clear cell adenocarcinoma, NOS; Granular cell carcinoma; Follicular adenocarcinoma, NOS; Papillary and follicular adenocarcinoma; Nonencapsulating sclerosing carcinoma; Adrenal cortical carcinoma; Endometroid carcinoma; Skin appendage carcinoma; Apocrine adenocarcinoma; Sebaceous adenocarcinoma; Ceruminous adenocarcinoma; Mucoepidermoid carcinoma; Cystadenocarcinoma, NOS; Papillary cystadenocarcinoma, NOS; Papillary serous cystadenocarcinoma; Mucinous cystadenocarcinoma, NOS; Mucinous adenocarcinoma; Signet ring cell carcinoma; Infiltrating duct carcinoma; Medullary carcinoma, NOS; Lobular carcinoma; Inflammatory carcinoma; Paget's disease, mammary; Acinar cell carcinoma; Adenosquamous carcinoma; Adenocarcinoma w/squamous metaplasia; Thymoma, malignant; Ovarian stromal tumor, malignant; Thecoma, malignant; Granulosa cell tumor, malignant; Androblastoma, malignant; Sertoli cell carcinoma; Leydig cell tumor, malignant; Lipid cell tumor, malignant; Paraganglioma, malignant; Extra-mammary paraganglioma, malignant; Pheochromocytoma; Glomangiosarcoma; Malignant melanoma, NOS; Amelanotic melanoma; Superficial spreading melanoma; Malig melanoma in giant pigmented nevus; Epithelioid cell melanoma; Blue nevus, malignant; Sarcoma, NOS; Fibrosarcoma, NOS; Fibrous histiocytoma, malignant; Myxosarcoma; Liposarcoma, NOS; Leiomyosarcoma, NOS; Rhabdomyosarcoma, NOS; Embryonal rhabdomyosarcoma; Alveolar rhabdomyosarcoma; Stromal sarcoma, NOS; Mixed tumor, malignant, NOS; Mullerian mixed tumor; Nephroblastoma; Hepatoblastoma; Carcinosarcoma, NOS; Mesenchymoma, malignant; Brenner tumor, malignant; Phyllodes tumor, malignant; Synovial sarcoma, NOS; Mesothelioma, malignant; Dysgerminoma; Embryonal carcinoma, NOS; Teratoma, malignant, NOS; Struma ovarii, malignant; Choriocarcinoma; Mesonephroma, malignant; Hemangiosarcoma; Hemangioendothelioma, malignant; Kaposi's sarcoma; Hemangiopericytoma, malignant; Lymphangiosarcoma; Osteosarcoma, NOS; Juxtacortical osteosarcoma; Chondrosarcoma, NOS; Chondroblastoma, malignant; Mesenchymal chondrosarcoma; Giant cell tumor of bone; Ewing's sarcoma; Odontogenic tumor, malignant; Ameloblastic odontosarcoma; Ameloblastoma, malignant; Ameloblastic fibrosarcoma; Pinealoma, malignant; Chordoma; Glioma, malignant; Ependymoma, NOS; Astrocytoma, NOS; Protoplasmic astrocytoma; Fibrillary astrocytoma; Astroblastoma; Glioblastoma, NOS; Oligodendroglioma, NOS; Oligodendroblastoma; Primitive neuroectodermal; Cerebellar sarcoma, NOS; Ganglioneuroblastoma; Neuroblastoma, NOS; Retinoblastoma, NOS; Olfactory neurogenic tumor; Meningioma, malignant; Neurofibrosarcoma; Neurilemmoma, malignant; Granular cell tumor, malignant; Malignant lymphoma, NOS; Hodgkin's disease, NOS; Hodgkin's; paragranuloma, NOS; Malignant lymphoma, small lymphocytic; Malignant lymphoma, large cell, diffuse; Malignant lymphoma, follicular, NOS; Mycosis fungoides; Other specified non-Hodgkin's lymphomas; Malignant histiocytosis; Multiple myeloma; Mast cell sarcoma; Immunoproliferative small intestinal disease; Leukemia, NOS; Lymphoid leukemia, NOS; Plasma cell leukemia; Erythroleukemia; Lymphosarcoma cell leukemia; Myeloid leukemia, NOS; Basophilic leukemia; Eosinophilic leukemia; Monocytic leukemia, NOS; Mast cell leukemia; Megakaryoblastic leukemia; Myeloid sarcoma; and Hairy cell leukemia.

[0046] In addition, the CA genes may be involved in other diseases such as, but not limited to, diseases associated with aging or neurodegeneration.

[0047] “Association” in this context means that the nucleotide or protein sequences are either differentially expressed, activated, inactivated or altered in cancers as compared to normal tissue. As outlined below, CA sequences include those that are up-regulated (i.e. expressed at a higher level), as well as those that are down-regulated (i.e. expressed at a lower level), in cancers. CA sequences also include sequences that have been altered (i.e., truncated sequences or sequences with substitutions, deletions or insertions, including point mutations) and show either the same expression profile or an altered profile. In a preferred embodiment, the CA sequences are from humans; however, as will be appreciated by those in the art, CA sequences from other organisms may be useful in animal models of disease and drug evaluation; thus, other CA sequences are provided, from vertebrates, including mammals, including rodents (rats, mice, hamsters, guinea pigs, etc.), primates, and farm animals (including sheep, goats, pigs, cows, horses, etc). In some cases, prokaryotic CA sequences may be useful. CA sequences from other organisms may be obtained using the techniques outlined below.

[0048] CA sequences include both nucleic acid and amino acid sequences. In a preferred embodiment, the CA sequences are recombinant nucleic acids. By the term “recombinant nucleic acid” herein is meant nucleic acid, originally formed in vitro, in general, by the manipulation of nucleic acid by polymerases and endonucleases, in a form not normally found in nature. Thus a recombinant nucleic acid is also an isolated nucleic acid, in a linear form, or cloned in a vector formed in vitro by ligating DNA molecules that are not normally joined, are both considered recombinant for the purposes of this invention. It is understood that once a recombinant nucleic acid is made and reintroduced into a host cell or organism, it will replicate using the in vivo cellular machinery of the host cell rather than in vitro manipulations; however, such nucleic acids, once produced recombinantly, although subsequently replicated in vivo, are still considered recombinant or isolated for the purposes of the invention. As used herein a “polynucleotide” or “nucleic acid” is a polymeric form of nucleotides of any length, either ribonucleotides or deoxyribonucleotides. This term refers only to the primary structure of the molecule. Thus, this term includes double- and single-stranded DNA and RNA. It also includes known types of modifications, for example, labels which are known in the art, methylation, “caps”, substitution of one or more of the naturally occurring nucleotides with an analog, internucleotide modifications such as, for example, those with uncharged linkages (e.g., phosphorothioates, phosphorodithioates, etc.), those containing pendant moieties, such as, for example proteins (including e.g., nucleases, toxins, antibodies, signal peptides, poly-L-lysine, etc.), those with intercalators (e.g., acridine, psoralen, etc.), those containing chelators (e.g., metals, radioactive metals, etc.), those containing alkylators, those with modified linkages (e.g., alpha anomeric nucleic acids, etc.), as well as unmodified forms of the polynucleotide.

[0049] As used herein, a polynucleotide “derived from” a designated sequence refers to a polynucleotide sequence which is comprised of a sequence of approximately at least about 6 nucleotides, preferably at least about 8 nucleotides, more preferably at least about 10-12 nucleotides, and even more preferably at least about 15-20 nucleotides corresponding to a region of the designated nucleotide sequence. “Corresponding” means homologous to or complementary to the designated sequence. Preferably, the sequence of the region from which the polynucleotide is derived is homologous to or complementary to a sequence that is unique to a CA gene.

[0050] Similarly, a “recombinant protein” is a protein made using recombinant techniques, i.e. through the expression of a recombinant nucleic acid as depicted above. A recombinant protein is distinguished from naturally occurring protein by at least one or more characteristics. For example, the protein may be isolated or purified away from some or all of the proteins and compounds with which it is normally associated in its wild type host, and thus may be substantially pure. For example, an isolated protein is unaccompanied by at least some of the material with which it is normally associated in its natural state, preferably constituting at least about 0.5%, more preferably at least about 5% by weight of the total protein in a given sample. A substantially pure protein comprises about 50-75% by weight of the total protein, with about 80% being preferred, and about 90% being particularly preferred. The definition includes the production of a CA protein from one organism in a different organism or host cell. Alternatively, the protein may be made at a significantly higher concentration than is normally seen, through the use of an inducible promoter or high expression promoter, such that the protein is made at increased concentration levels. Alternatively, the protein may be in a form not normally found in nature, as in the addition of an epitope tag or amino acid substitutions, insertions and deletions, as discussed below.

[0051] In a preferred embodiment, the CA sequences are nucleic acids. As will be appreciated by those in the art and is more fully outlined below, CA sequences are useful in a variety of applications, including diagnostic applications, which will detect naturally occurring nucleic acids, as well as screening applications; for example, biochips comprising nucleic acid probes to the CA sequences can be generated. In the broadest sense, use of “nucleic acid,” “polynucleotide” or “oligonucleotide” or equivalents herein means at least two nucleotides covalently linked together. In some embodiments, an oligonucleotide is an oligomer of 6, 8, 10, 12, 20, 30 or up to 100 nucleotides. A “polynucleotide” or “oligonucleotide” may comprise DNA, RNA, PNA or a polymer of nucleotides linked by phosphodiester and/or any alternate bonds.

[0052] A nucleic acid of the present invention generally contains phosphodiester bonds, although in some cases, as outlined below (for example, in antisense applications or when a nucleic acid is a candidate drug agent), nucleic acid analogs may have alternate backbones, comprising, for example, phosphoramidate (Beaucage et al., Tetrahedron 49(10):1925 (1993) and references therein; Letsinger, J. Org. Chem. 35:3800 (1970); Sprinzl et al., Eur. J. Biochem. 81:579 (1977); Letsinger et al., Nucl. Acids Res. 14:3487 (1986); Sawai et al, Chem. Lett. 805 (1984), Letsinger et al., J. Am. Chem. Soc. 110:4470 (1988); and Pauwels et al., Chemica Scripta 26:141 91986)), phosphorothioate (Mag et al., Nucleic Acids Res. 19:1437 (1991); and U.S. Pat. No. 5,644,048), phosphorodithioate (Briu et al., J. Am. Chem. Soc. 111:2321 (1989), O-methylphosphoroamidite linkages (see Eckstein, Oligonucleotides and Analogues: A Practical Approach, Oxford University Press), and peptide nucleic acid backbones and linkages (see Egholm, J. Am. Chem. Soc. 114:1895 (1992); Meier et al., Chem. Int. Ed. Engl. 31:1008 (1992); Nielsen, Nature, 365:566 (1993); Carlsson et al., Nature 380:207 (1996), all of which are incorporated by reference). Other analog nucleic acids include those with positive backbones (Denpcy et al., Proc. Natl. Acad. Sci. USA 92:6097 (1995); non-ionic backbones (U.S. Pat. Nos. 5,386,023, 5,637,684, 5,602,240, 5,216,141 and 4,469,863; Kiedrowshi et al., Angew. Chem. Intl. Ed. English 30:423 (1991); Letsinger et al., J. Am. Chem. Soc. 110:4470 (1988); Letsinger et al., Nucleoside & Nucleotide 13:1597 (1994); Chapters 2 and 3, ASC Symposium Series 580, “Carbohydrate Modifications in Antisense Research”, Ed. Y. S. Sanghui and P. Dan Cook; Mesmaeker et al., Bioorganic & Medicinal Chem. Lett. 4:395 (1994); Jeffs et al., J. Biomolecular NMR 34:17 (1994); Tetrahedron Lett. 37:743 (1996)) and non-ribose backbones, including those described in U.S. Pat. Nos. 5,235,033 and 5,034,506, and Chapters 6 and 7, ASC Symposium Series 580, “Carbohydrate Modifications in Antisense Research”, Ed. Y. S. Sanghui and P. Dan Cook. Nucleic acids containing one or more carbocyclic sugars are also included within one definition of nucleic acids (see Jenkins et al., Chem. Soc. Rev. (1995) pp 169-176). Several nucleic acid analogs are described in Rawls, C & E News Jun. 2, 1997 page 35. All of these references are hereby expressly incorporated by reference. These modifications of the ribose-phosphate backbone may be done for a variety of reasons, for example to increase the stability and half-life of such molecules in physiological environments for use in anti-sense applications or as probes on a biochip.

[0053] As will be appreciated by those in the art, all of these nucleic acid analogs may find use in the present invention. In addition, mixtures of naturally occurring nucleic acids and analogs can be made; alternatively, mixtures of different nucleic acid analogs, and mixtures of naturally occurring nucleic acids and analogs may be made.

[0054] The nucleic acids may be single stranded or double stranded, as specified, or contain portions of both double stranded or single stranded sequence. As will be appreciated by those in the art, the depiction of a single strand “Watson” also defines the sequence of the other strand “Crick”; thus the sequences described herein also includes the complement of the sequence. The nucleic acid may be DNA, both genomic and cDNA, RNA, or a hybrid, where the nucleic acid contains any combination of deoxyribo- and ribo-nucleotides, and any combination of bases, including uracil, adenine, thymine, cytosine, guanine, inosine, xanthine, hypoxanthine, isocytosine, isoguanine, etc. As used herein, the term “nucleoside” includes nucleotides and nucleoside and nucleotide analogs, and modified nucleosides such as amino modified nucleosides. In addition, “nucleoside” includes non-naturally occurring analog structures. Thus for example the individual units of a peptide nucleic acid, each containing a base, are referred to herein as a nucleoside.

[0055] As used herein, the term “tag,” “sequence tag” or “primer tag sequence” refers to an oligonucleotide with specific nucleic acid sequence that serves to identify a batch of polynucleotides bearing such tags therein. Polynucleotides from the same biological source are covalently tagged with a specific sequence tag so that in subsequent analysis the polynucleotide can be identified according to its source of origin. The sequence tags also serve as primers for nucleic acid amplification reactions.

[0056] A “microarray” is a linear or two-dimensional array of preferably discrete regions, each having a defined area, formed on the surface of a solid support. The density of the discrete regions on a microarray is determined by the total numbers of target polynucleotides to be detected on the surface of a single solid phase support, preferably at least about 50/cm², more preferably at least about 100/cm², even more preferably at least about 500/cm², and still more preferably at least about 1,000/cm². As used herein, a DNA microarray is an array of oligonucleotide primers placed on a chip or other surfaces used to amplify or clone target polynucleotides. Since the position of each particular group of primers in the array is known, the identities of the target polynucleotides can be determined based on their binding to a particular position in the microarray.

[0057] A “linker” is a synthetic oligodeoxyribonucleotide that contains a restriction site. A linker may be blunt end-ligated onto the ends of DNA fragments to create restriction sites that can be used in the subsequent cloning of the fragment into a vector molecule.

[0058] The term “label” refers to a composition capable of producing a detectable signal indicative of the presence of the target polynucleotide in an assay sample. Suitable labels include radioisotopes, nucleotide chromophores, enzymes, substrates, fluorescent molecules, chemiluminescent moieties, magnetic particles, bioluminescent moieties, and the like. As such, a label is any composition detectable by spectroscopic, photochemical, biochemical, immunochemical, electrical, optical, chemical, or any other appropriate means. The term “label” is used to refer to any chemical group or moiety having a detectable physical property or any compound capable of causing a chemical group or moiety to exhibit a detectable physical property, such as an enzyme that catalyzes conversion of a substrate into a detectable product. The term “label” also encompasses compounds that inhibit the expression of a particular physical property. The label may also be a compound that is a member of a binding pair, the other member of which bears a detectable physical property.

[0059] The term “support” refers to conventional supports such as beads, particles, dipsticks, fibers, filters, membranes, and silane or silicate supports such as glass slides.

[0060] The term “amplify” is used in the broad sense to mean creating an amplification product which may include, for example, additional target molecules, or target-like molecules or molecules complementary to the target molecule, which molecules are created by virtue of the presence of the target molecule in the sample. In the situation where the target is a nucleic acid, an amplification product can be made enzymatically with DNA or RNA polymerases or reverse transcriptases.

[0061] As used herein, a “biological sample” refers to a sample of tissue or fluid isolated from an individual, including but not limited to, for example, blood, plasma, serum, spinal fluid, lymph fluid, skin, respiratory, intestinal and genitourinary tracts, tears, saliva, milk, cells (including but not limited to blood cells), tumors, organs, and also samples of in vitro cell culture constituents.

[0062] The term “biological sources” as used herein refers to the sources from which the target polynucleotides are derived. The source can be of any form of “sample” as described above, including but not limited to, cell, tissue or fluid. “Different biological sources” can refer to different cells/tissues/organs of the same individual, or cells/tissues/organs from different individuals of the same species, or cells/tissues/organs from different species.

Cancer-Associated Sequences

[0063] The CA sequences of the invention were initially identified by infection of mice with a retrovirus such as murine leukemia virus (MLV) resulting in lymphoma. Retroviruses have a genome that is made out of RNA. After a retrovirus infects a host cell, a double stranded DNA copy of the retrovirus genome (a “provirus”) is inserted into the genomic DNA of the host cell. The integrated provirus may affect the expression of host genes at or near the site of integration—a phenomenon known as retroviral insertional mutagenesis. Possible changes in the expression of host cell genes include: (i) increased expression of genes near the site of integration resulting from the proximity of elements in the provirus that act as transcriptional promoters and enhancers, (ii) functional inactivation of a gene caused by the integration of a provirus into the gene itself thus preventing the synthesis of a functional gene product, or (iii) expression of a mutated protein that has a different activity to the normal protein. Typically such a protein would be prematurely truncated and lack a regulatory domain near the C terminus. Such a protein might be constitutively active, or act as a dominant negative inhibitor of the normal protein. For example, retrovirus enhancers, including that of SL3-3, are known to act on genes up to approximately 200 kilobases from the insertion site. Moreover, many of these sequences are also involved in other cancers and disease states. Sequences of mouse genes according to this invention, that are identified in this manner are shown as mDxx-yyy in Tables 1-124.

[0064] A CA sequence can be initially identified by substantial nucleic acid and/or amino acid sequence homology to the CA sequences outlined herein. Such homology can be based upon the overall nucleic acid or amino acid sequence, and is generally determined as outlined below, using either homology programs or hybridization conditions.

[0065] In one embodiment, CA sequences are those that are up-regulated in cancers; that is, the expression of these genes is higher in cancer tissue as compared to normal tissue of the same differentiation stage. “Up-regulation” as used herein means increased expression by about 50%, preferably about 100%, more preferably about 150% to about 200%, with up-regulation from 300% to 1000% being preferred.

[0066] In another embodiment, CA sequences are those that are down-regulated in cancers; that is, the expression of these genes is lower in cancer tissue as compared to normal tissue of the same differentiation stage. “Down-regulation” as used herein means decreased expression by about 50%, preferably about 100%, more preferably about 150% to about 200%, with down-regulation from 300% to 1000% to no expression being preferred.

[0067] In yet another embodiment, CA sequences are those that have altered sequences but show either the same or an altered expression profile as compared to normal lymphoid tissue of the same differentiation stage. “Altered CA sequences” as used herein also refers to sequences that are truncated, contain insertions or contain point mutations.

[0068] CA proteins of the present invention may be classified as secreted proteins, transmembrane proteins or intracellular proteins. In a preferred embodiment the CA protein is an intracellular protein. Intracellular proteins may be found in the cytoplasm and/or in the nucleus. Intracellular proteins are involved in all aspects of cellular function and replication (including, for example, signaling pathways); aberrant expression of such proteins results in unregulated or disregulated cellular processes. For example, many intracellular proteins have enzymatic activity such as protein kinase activity, protein phosphatase activity, protease activity, nucleotide cyclase activity, polymerase activity and the like. Intracellular proteins also serve as docking proteins that are involved in organizing complexes of proteins, or targeting proteins to various subcellular localizations, and are involved in maintaining the structural integrity of organelles.

[0069] An increasingly appreciated concept in characterizing intracellular proteins is the presence in the proteins of one or more motifs for which defined functions have been attributed. In addition to the highly conserved sequences found in the enzymatic domain of proteins, highly conserved sequences have been identified in proteins that are involved in protein-protein interaction. For example, Src-homology-2 (SH2) domains bind tyrosine-phosphorylated targets in a sequence dependent manner. PTB domains, which are distinct from SH2 domains, also bind tyrosine phosphorylated targets. SH3 domains bind to proline-rich targets. In addition, PH domains, tetratricopeptide repeats and WD domains to name only a few, have been shown to mediate protein-protein interactions. Some of these may also be involved in binding to phospholipids or other second messengers. As will be appreciated by one of ordinary skill in the art, these motifs can be identified on the basis of primary sequence; thus, an analysis of the sequence of proteins may provide insight into both the enzymatic potential of the molecule and/or molecules with which the protein may associate.

[0070] In a preferred embodiment, the CA sequences are transmembrane proteins. Transmembrane proteins are molecules that span the phospholipid bilayer of a cell. They may have an intracellular domain, an extracellular domain, or both. The intracellular domains of such proteins may have a number of functions including those already described for intracellular proteins. For example, the intracellular domain may have enzymatic activity and/or may serve as a binding site for additional proteins. Frequently the intracellular domain of transmembrane proteins serves both roles. For example certain receptor tyrosine kinases have both protein kinase activity and SH2 domains. In addition, autophosphorylation of tyrosines on the receptor molecule itself creates binding sites for additional SH2 domain containing proteins.

[0071] Transmembrane proteins may contain from one to many transmembrane domains. For example, receptor tyrosine kinases, certain cytokine receptors, receptor guanylyl cyclases and receptor serine/threonine protein kinases contain a single transmembrane domain. However, various other proteins including channels and adenylyl cyclases contain numerous transmembrane domains. Many important cell surface receptors are classified as “seven transmembrane domain” proteins, as they contain 7 membrane spanning regions. Important transmembrane protein receptors include, but are not limited to insulin receptor, insulin-like growth factor receptor, human growth hormone receptor, glucose transporters, transferrin receptor, epidermal growth factor receptor, low density lipoprotein receptor, leptin receptor, interleukin receptors, e.g. IL-1 receptor, IL-2 receptor, etc. CA proteins may be derived from genes that regulate apoptosis (IL-3, GM-CSF and Bcl-x) or are shown to have a role in the regulation of apoptosis.

[0072] Characteristics of transmembrane domains include approximately 20 consecutive hydrophobic amino acids that may be followed by charged amino acids. Therefore, upon analysis of the amino acid sequence of a particular protein, the localization and number of transmembrane domains within the protein may be predicted.

[0073] The extracellular domains of transmembrane proteins are diverse; however, conserved motifs are found repeatedly among various extracellular domains. Conserved structure and/or functions have been ascribed to different extracellular motifs. For example, cytokine receptors are characterized by a cluster of cysteines and a WSXWS (W=tryptophan, S=serine, X=any amino acid) motif. Immunoglobulin-like domains are highly conserved. Mucin-like domains may be involved in cell adhesion and leucine-rich repeats participate in protein-protein interactions.

[0074] Many extracellular domains are involved in binding to other molecules. In one aspect, extracellular domains are receptors. Factors that bind the receptor domain include circulating ligands, which may be peptides, proteins, or small molecules such as adenosine and the like. For example, growth factors such as EGF, FGF and PDGF are circulating growth factors that bind to their cognate receptors to initiate a variety of cellular responses. Other factors include cytokines, mitogenic factors, neurotrophic factors and the like. Extracellular domains also bind to cell-associated molecules. In this respect, they mediate cell-cell interactions. Cell-associated ligands can be tethered to the cell for example via a glycosylphosphatidylinositol (GPI) anchor, or may themselves be transmembrane proteins. Extracellular domains also associate with the extracellular matrix and contribute to the maintenance of the cell structure.

[0075] CA proteins that are transmembrane are particularly preferred in the present invention as they are good targets for immunotherapeutics, as are described herein. In addition, as outlined below, transmembrane proteins can be also useful in imaging modalities.

[0076] It will also be appreciated by those in the art that a transmembrane protein can be made soluble by removing transmembrane sequences, for example through recombinant methods. Furthermore, transmembrane proteins that have been made soluble can be made to be secreted through recombinant means by adding an appropriate signal sequence.

[0077] In a preferred embodiment, the CA proteins are secreted proteins; the secretion of which can be either constitutive or regulated. These proteins have a signal peptide or signal sequence that targets the molecule to the secretory pathway. Secreted proteins are involved in numerous physiological events; by virtue of their circulating nature, they serve to transmit signals to various other cell types. The secreted protein may function in an autocrine manner (acting on the cell that secreted the factor), a paracrine manner (acting on cells in close proximity to the cell that secreted the factor) or an endocrine manner (acting on cells at a distance). Thus secreted molecules find use in modulating or altering numerous aspects of physiology. CA proteins that are secreted proteins are particularly preferred in the present invention as they serve as good targets for diagnostic markers, for example for blood tests.

CA Sequences and Homologs

[0078] A CA sequence is initially identified by substantial nucleic acid and/or amino acid sequence homology to the CA sequences outlined herein. Such homology can be based upon the overall nucleic acid or amino acid sequence, and is generally determined as outlined below, using either homology programs or hybridization conditions.

[0079] As used herein, a nucleic acid is a “CA nucleic acid” if the overall homology of the nucleic acid sequence to one of the nucleic acids of Tables 1-124 is preferably greater than about 75%, more preferably greater than about 80%, even more preferably greater than about 85% and most preferably greater than 90%. In some embodiments the homology will be as high as about 93 to 95 or 98%. In a preferred embodiment, the sequences that are used to determine sequence identity or similarity are selected from those of the nucleic acids of Tables 1-124. In another embodiment, the sequences are naturally occurring allelic variants of the sequences of the nucleic acids of Tables 1-124. In another embodiment, the sequences are sequence variants as further described herein.

[0080] Homology in this context means sequence similarity or identity, with identity being preferred. A preferred comparison for homology purposes is to compare the sequence containing sequencing errors to the correct sequence. This homology will be determined using standard techniques known in the art, including, but not limited to, the local homology algorithm of Smith & Waterman, Adv. Appl. Math. 2:482 (1981), by the homology alignment algorithm of Needleman & Wunsch, J. Mol. Biol. 48:443 (1970), by the search for similarity method of Pearson & Lipman, PNAS USA 85:2444 (1988), by computerized implementations of these algorithms (GAP, BESTFIT, FASTA, and TFASTA in the Wisconsin Genetics Software Package, Genetics Computer Group, 575 Science Drive, Madison, Wis.), the Best Fit sequence program described by Devereux et al., Nucl. Acid Res. 12:387-395 (1984), preferably using the default settings, or by inspection.

[0081] One example of a useful algorithm is PILEUP. PILEUP creates a multiple sequence alignment from a group of related sequences using progressive, pairwise alignments. It can also plot a tree showing the clustering relationships used to create the alignment. PILEUP uses a simplification of the progressive alignment method of Feng & Doolittle, J. Mol. Evol. 35:351-360 (1987); the method is similar to that described by Higgins & Sharp CABIOS 5:151-153 (1989). Useful PILEUP parameters include a default gap weight of 3.00, a default gap length weight of 0.10, and weighted end gaps.

[0082] Another example of a useful algorithm is the BLAST (Basic Local Alignment Search Tool) algorithm, described in Altschul et al., J. Mol. Biol. 215, 403-410, (1990) and Karlin et al., PNAS USA 90:5873-5787 (1993). A particularly useful BLAST program is the WU-BLAST-2 program which was obtained from Altschul et al., Methods in Enzymology, 266: 460-480 (1996); http://blast.wustl.edu/]. WU-BLAST-2 uses several search parameters, most of which are set to the default values. The adjustable parameters are set with the following values: overlap span=1, overlap fraction=0.125, word threshold (T)=11. The HSP S and HSP S2 parameters are dynamic values and are established by the program itself depending upon the composition of the particular sequence and composition of the particular database against which the sequence of interest is being searched; however, the values may be adjusted to increase sensitivity. A percent amino acid sequence identity value is determined by the number of matching identical residues divided by the total number of residues of the “longer” sequence in the aligned region. The “longer” sequence is the one having the most actual residues in the aligned region (gaps introduced by WU-Blast-2 to maximize the alignment score are ignored).

[0083] Thus, “percent (%) nucleic acid sequence identity” is defined as the percentage of nucleotide residues in a candidate sequence that are identical with the nucleotide residues of the nucleic acids of Tables 1-124. A preferred method utilizes the BLASTN module of WU-BLAST-2 set to the default parameters, with overlap span and overlap fraction set to 1 and 0.125, respectively.

[0084] The alignment may include the introduction of gaps in the sequences to be aligned. In addition, for sequences which contain either more or fewer nucleotides than those of the nucleic acids of Tables 1-124, it is understood that the percentage of homology will be determined based on the number of homologous nucleosides in relation to the total number of nucleosides. Thus homology of sequences shorter than those of the sequences identified herein will be determined using the number of nucleosides in the shorter sequence.

[0085] In another embodiment of the invention, polynucleotide compositions are provided that are capable of hybridizing under moderate to high stringency conditions to a polynucleotide sequence provided herein, or a fragment thereof, or a complementary sequence thereof. Hybridization techniques are well known in the art of molecular biology. For purposes of illustration, suitable moderately stringent conditions for testing the hybridization of a polynucleotide of this invention with other polynucleotides include prewashing in a solution of 5×SSC (“saline sodium citrate”; 9 mM NaCl, 0.9 mM sodium citrate), 0.5% SDS, 1.0 mM EDTA (pH 8.0); hybridizing at 50-60° C., 5×SSC, overnight; followed by washing twice at 65° C. for 20 minutes with each of 2×, 0.5× and 0.2×SSC containing 0.1% SDS. One skilled in the art will understand that the stringency of hybridization can be readily manipulated, such as by altering the salt content of the hybridization solution and/or the temperature at which the hybridization is performed. For example, in another embodiment, suitable highly stringent hybridization conditions include those described above, with the exception that the temperature of hybridization is increased, e.g., to 60-65° C., or 65-70° C. Stringent conditions may also be achieved with the addition of destabilizing agents such as formamide.

[0086] Thus nucleic acids that hybridize under high stringency to the nucleic acids identified in the figures, or their complements, are considered CA sequences. High stringency conditions are known in the art; see for example Maniatis et al., Molecular Cloning: A Laboratory Manual, 2d Edition, 1989, and Short Protocols in Molecular Biology, ed. Ausubel, et al., both of which are hereby incorporated by reference. Stringent conditions are sequence-dependent and will be different in different circumstances. Longer sequences hybridize specifically at higher temperatures. An extensive guide to the hybridization of nucleic acids is found in Tijssen, Techniques in Biochemistry and Molecular Biology—Hybridization with Nucleic Acid Probes, “Overview of principles of hybridization and the strategy of nucleic acid assays” (1993). Generally, stringent conditions are selected to be about 5-10° C. lower than the thermal melting point (Tₘ) for the specific sequence at a defined ionic strength pH. The Tₘ is the temperature (under defined ionic strength, pH and nucleic acid concentration) at which 50% of the probes complementary to the target hybridize to the target sequence at equilibrium (as the target sequences are present in excess, at Tₘ, 50% of the probes are occupied at equilibrium). Stringent conditions will be those in which the salt concentration is less than about 1.0 M sodium ion, typically about 0.01 to 1.0 M sodium ion concentration (or other salts) at pH 7.0 to 8.3 and the temperature is at least about 30° C. for short probes (e.g. 10 to 50 nucleotides) and at least about 60° C. for longer probes (e.g. greater than 50 nucleotides). In another embodiment, less stringent hybridization conditions are used; for example, moderate or low stringency conditions may be used, as are known in the art; see Maniatis and Ausubel, supra, and Tijssen, supra.

[0087] In addition, the CA nucleic acid sequences of the invention are fragments of larger genes, i.e. they are nucleic acid segments. Alternatively, the CA nucleic acid sequences can serve as indicators of oncogene position, for example, the CA sequence may be an enhancer that activates a protooncogene. “Genes” in this context includes coding regions, non-coding regions, and mixtures of coding and non-coding regions. Accordingly, as will be appreciated by those in the art, using the sequences provided herein, additional sequences of the CA genes can be obtained, using techniques well known in the art for cloning either longer sequences or the full-length sequences; see Maniatis et al., and Ausubel, et al., supra, hereby expressly incorporated by reference. In general, this is done using PCR, for example, kinetic PCR.

Detection of CA Expression

[0088] Once the CA nucleic acid is identified, it can be cloned and, if necessary, its constituent parts recombined to form the entire CA nucleic acid. Once isolated from its natural source, e.g., contained within a plasmid or other vector or excised therefrom as a linear nucleic acid segment, the recombinant CA nucleic acid can be further used as a probe to identify and isolate other CA nucleic acids, for example additional coding regions. It can also be used as a “precursor” nucleic acid to make modified or variant CA nucleic acids and proteins. In a preferred embodiment, once a CA gene is identified its nucleotide sequence is used to design probes specific for the CA gene.

[0089] The CA nucleic acids of the present invention are used in several ways. In a first embodiment, nucleic acid probes hybridizable to CA nucleic acids are made and attached to biochips to be used in screening and diagnostic methods, or for gene therapy and/or antisense applications. Alternatively, the CA nucleic acids that include coding regions of CA proteins can be put into expression vectors for the expression of CA proteins, again either for screening purposes or for administration to a patient.

[0090] Recent developments in DNA microarray technology make it possible to conduct a large scale assay of a plurality of target CA nucleic acid molecules on a single solid phase support. U.S. Pat. No. 5,837,832 (Chee et al.) and related patent applications describe immobilizing an array of oligonucleotide probes for hybridization and detection of specific nucleic acid sequences in a sample. Target polynucleotides of interest isolated from a tissue of interest are hybridized to the DNA chip and the specific sequences detected based on the target polynucleotides' preference and degree of hybridization at discrete probe locations. One important use of arrays is in the analysis of differential gene expression, where the profile of expression of genes in different cells, often a cell of interest and a control cell, is compared and any differences in gene expression among the respective cells are identified. Such information is useful for the identification of the types of genes expressed in a particular cell or tissue type and diagnosis of cancer conditions based on the expression profile.

[0091] Typically, RNA from the sample of interest is subjected to reverse transcription to obtain labeled cDNA. See U.S. Pat. No. 6,410,229 (Lockhart et al.) The cDNA is then hybridized to oligonucleotides or cDNAs of known sequence arrayed on a chip or other surface in a known order. The location of the oligonucleotide to which the labeled cDNA hybridizes provides sequence information on the cDNA, while the amount of labeled hybridized RNA or cDNA provides an estimate of the relative representation of the RNA or cDNA of interest. See Schena, et al. Science 270:467-470 (1995). For example, use of a cDNA microarray to analyze gene expression patterns in human cancer is described by DeRisi, et al. (Nature Genetics 14:457-460 (1996)).

[0092] In a preferred embodiment, nucleic acid probes corresponding to CA nucleic acids (both the nucleic acid sequences outlined in the figures and/or the complements thereof) are made. Typically, these probes are synthesized based on the disclosed sequences of this invention. The nucleic acid probes attached to the biochip are designed to be substantially complementary to the CA nucleic acids, i.e. the target sequence (either the target sequence of the sample or to other probe sequences, for example in sandwich assays), such that specific hybridization of the target sequence and the probes of the present invention occurs. As outlined below, this complementarity need not be perfect, in that there may be any number of base pair mismatches that will interfere with hybridization between the target sequence and the single stranded nucleic acids of the present invention. It is expected that the overall homology of the genes at the nucleotide level probably will be about 40% or greater, probably about 60% or greater, and even more probably about 80% or greater; and in addition that there will be corresponding contiguous sequences of about 8-12 nucleotides or longer. However, if the number of mutations is so great that no hybridization can occur under even the least stringent of hybridization conditions, the sequence is not a complementary target sequence. Thus, by “substantially complementary” herein is meant that the probes are sufficiently complementary to the target sequences to hybridize under normal reaction conditions, particularly high stringency conditions, as outlined herein. Whether or not a sequence is unique to a CA gene according to this invention can be determined by techniques known to those of skill in the art. For example, the sequence can be compared to sequences in databanks, e.g., GeneBank, to determine whether it is present in the uninfected host or other organisms. The sequence can also be compared to the known sequences of other viral agents, including those that are known to induce cancer.

[0093] A nucleic acid probe is generally single stranded but can be partly single and partly double stranded. The strandedness of the probe is dictated by the structure, composition, and properties of the target sequence. In general, the oligonucleotide probes range from about 6, 8, 10, 12, 15, 20, 30 to about 100 bases long, with from about 10 to about 80 bases being preferred, and from about 30 to about 50 bases being particularly preferred. That is, generally entire genes are rarely used as probes. In some embodiments, much longer nucleic acids can be used, up to hundreds of bases. The probes are sufficiently specific to hybridize to complementary template sequence under conditions known by those of skill in the art. The number of mismatches between the probes sequences and their complementary template (target) sequences to which they hybridize during hybridization generally do not exceed 15%, usually do not exceed 10% and preferably do not exceed 5%, as determined by FASTA (default settings).

[0094] Oligonucleotide probes can include the naturally-occurring heterocyclic bases normally found in nucleic acids (uracil, cytosine, thymine, adenine and guanine), as well as modified bases and base analogues. Any modified base or base analogue compatible with hybridization of the probe to a target sequence is useful in the practice of the invention. The sugar or glycoside portion of the probe can comprise deoxyribose, ribose, and/or modified forms of these sugars, such as, for example, 2′-O-alkyl ribose. In a preferred embodiment, the sugar moiety is 2′-deoxyribose; however, any sugar moiety that is compatible with the ability of the probe to hybridize to a target sequence can be used.

[0095] In one embodiment, the nucleoside units of the probe are linked by a phosphodiester backbone, as is well known in the art. In additional embodiments, internucleotide linkages can include any linkage known to one of skill in the art that is compatible with specific hybridization of the probe including, but not limited to phosphorothioate, methylphosphonate, sulfamate (e.g., U.S. Pat. No. 5,470,967) and polyamide (i.e., peptide nucleic acids). Peptide nucleic acids are described in Nielsen et al. (1991) Science 254: 1497-1500, U.S. Pat. No. 5,714,331, and Nielsen (1999) Curr. Opin. Biotechnol. 10:71-75.

[0096] In certain embodiments, the probe can be a chimeric molecule; i.e., can comprise more than one type of base or sugar subunit, and/or the linkages can be of more than one type within the same primer. The probe can comprise a moiety to facilitate hybridization to its target sequence, as are known in the art, for example, intercalators and/or minor groove binders. Variations of the bases, sugars, and internucleoside backbone, as well as the presence of any pendant group on the probe, will be compatible with the ability of the probe to bind, in a sequence-specific fashion, with its target sequence. A large number of structural modifications, both known and to be developed, are possible within these bounds. Advantageously, the probes according to the present invention may have structural characteristics such that they allow the signal amplification, such structural characteristics being, for example, branched DNA probes as those described by Urdea et al. (Nucleic Acids Symp. Ser., 24:197-200 (1991)) or in the European Patent No. EP-0225,807. Moreover, synthetic methods for preparing the various heterocyclic bases, sugars, nucleosides and nucleotides that form the probe, and preparation of oligonucleotides of specific predetermined sequence, are well-developed and known in the art. A preferred method for oligonucleotide synthesis incorporates the teaching of U.S. Pat. No. 5,419,966.

[0097] Multiple probes may be designed for a particular target nucleic acid to account for polymorphism and/or secondary structure in the target nucleic acid, redundancy of data and the like. In some embodiments, where more than one probe per sequence is used, either overlapping probes or probes to different sections of a single target CA gene are used. That is, two, three, four or more probes, with three being preferred, are used to build in a redundancy for a particular target. The probes can be overlapping (i.e. have some sequence in common), or specific for distinct sequences of a CA gene. When multiple target polynucleotides are to be detected according to the present invention, each probe or probe group corresponding to a particular target polynucleotide is situated in a discrete area of the microarray.

[0098] Probes may be in solution, such as in wells or on the surface of a micro-array, or attached to a solid support. Examples of solid support materials that can be used include a plastic, a ceramic, a metal, a resin, a gel and a membrane. Useful types of solid supports include plates, beads, magnetic material, microbeads, hybridization chips, membranes, crystals, ceramics and self-assembling monolayers. A preferred embodiment comprises a two-dimensional or three-dimensional matrix, such as a gel or hybridization chip with multiple probe binding sites (Pevzner et al., J. Biomol. Struc. & Dyn. 9:399-410, 1991; Maskos and Southern, Nuc. Acids Res. 20:1679-84, 1992). Hybridization chips can be used to construct very large probe arrays that are subsequently hybridized with a target nucleic acid. Analysis of the hybridization pattern of the chip can assist in the identification of the target nucleotide sequence. Patterns can be manually or computer analyzed, but it is clear that positional sequencing by hybridization lends itself to computer analysis and automation. Algorithms and software, which have been developed for sequence reconstruction, are applicable to the methods described herein (R. Drmanac et al., J. Biomol. Struc. & Dyn. 5:1085-1102, 1991; P. A. Pevzner, J. Biomol. Struc. & Dyn. 7:63-73, 1989).

[0099] As will be appreciated by those in the art, nucleic acids can be attached or immobilized to a solid support in a wide variety of ways. By “immobilized” herein is meant the association or binding between the nucleic acid probe and the solid support is sufficient to be stable under the conditions of binding, washing, analysis, and removal as outlined below. The binding can be covalent or non-covalent. By “non-covalent binding” and grammatical equivalents herein is meant one or more of either electrostatic, hydrophilic, and hydrophobic interactions. Included in non-covalent binding is the covalent attachment of a molecule, such as streptavidin, to the support and the non-covalent binding of the biotinylated probe to the streptavidin. By “covalent binding” and grammatical equivalents herein is meant that the two moieties, the solid support and the probe, are attached by at least one bond, including sigma bonds, pi bonds and coordination bonds. Covalent bonds can be formed directly between the probe and the solid support or can be formed by a cross linker or by inclusion of a specific reactive group on either the solid support or the probe or both molecules. Immobilization may also involve a combination of covalent and non-covalent interactions.

[0100] Nucleic acid probes may be attached to the solid support by covalent binding such as by conjugation with a coupling agent or by, covalent or non-covalent binding such as electrostatic interactions, hydrogen bonds or antibody-antigen coupling, or by combinations thereof. Typical coupling agents include biotin/avidin, biotin/streptavidin, Staphylococcus aureus protein A/IgG antibody F_{c} fragment, and streptavidin/protein A chimeras (T. Sano and C. R. Cantor, Bio/Technology 9:1378-81 (1991)), or derivatives or combinations of these agents. Nucleic acids may be attached to the solid support by a photocleavable bond, an electrostatic bond, a disulfide bond, a peptide bond, a diester bond or a combination of these sorts of bonds. The array may also be attached to the solid support by a selectively releasable bond such as 4,4′-dimethoxytrityl or its derivative. Derivatives which have been found to be useful include 3 or 4 [bis-(4-methoxyphenyl)]-methyl-benzoic acid, N-succinimidyl-3 or 4 [bis-(4-methoxyphenyl)]-methyl-benzoic acid, N-succinimidyl-3 or 4 [bis-(4-methoxyphenyl)]-hydroxymethyl-benzoic acid, N-succinimidyl-3 or 4 [bis-(4-methoxyphenyl)]-chloromethyl-benzoic acid, and salts of these acids.

[0101] In general, the probes are attached to the biochip in a wide variety of ways, as will be appreciated by those in the art. As described herein, the nucleic acids can either be synthesized first, with subsequent attachment to the biochip, or can be directly synthesized on the biochip.

[0102] The biochip comprises a suitable solid substrate. By “substrate” or “solid support” or other grammatical equivalents herein is meant any material that can be modified to contain discrete individual sites appropriate for the attachment or association of the nucleic acid probes and is amenable to at least one detection method. The solid phase support of the present invention can be of any solid materials and structures suitable for supporting nucleotide hybridization and synthesis. Preferably, the solid phase support comprises at least one substantially rigid surface on which the primers can be immobilized and the reverse transcriptase reaction performed. The substrates with which the polynucleotide microarray elements are stably associated may be fabricated from a variety of materials, including plastics, ceramics, metals, acrylamide, cellulose, nitrocellulose, glass, polystyrene, polyethylene vinyl acetate, polypropylene, polymethacrylate, polyethylene, polyethylene oxide, polysilicates, polycarbonates, Teflon®, fluorocarbons, nylon, silicon rubber, polyanhydrides, polyglycolic acid, polylactic acid, polyorthoesters, polypropylfumerate, collagen, glycosaminoglycans, and polyamino acids. Substrates may be two-dimensional or three-dimensional in form, such as gels, membranes, thin films, glasses, plates, cylinders, beads, magnetic beads, optical fibers, woven fibers, etc. A preferred form of array is a three-dimensional array. A preferred three-dimensional array is a collection of tagged beads. Each tagged bead has different primers attached to it. Tags are detectable by signaling means such as color (Luminex, Illumina) and electromagnetic field (Pharmaseq) and signals on tagged beads can even be remotely detected (e.g., using optical fibers). The size of the solid support can be any of the standard microarray sizes, useful for DNA microarray technology, and the size may be tailored to fit the particular machine being used to conduct a reaction of the invention. In general, the substrates allow optical detection and do not appreciably fluoresce.

[0103] In a preferred embodiment, the surface of the biochip and the probe may be derivatized with chemical functional groups for subsequent attachment of the two. Thus, for example, the biochip is derivatized with a chemical functional group including, but not limited to, amino groups, carboxy groups, oxo groups and thiol groups, with amino groups being particularly preferred. Using these functional groups, the probes can be attached using functional groups on the probes. For example, nucleic acids containing amino groups can be attached to surfaces comprising amino groups, for example using linkers as are known in the art; for example, homo- or hetero-bifunctional linkers as are well known (see 1994 Pierce Chemical Company catalog, technical section on cross-linkers, pages 155-200, incorporated herein by reference). In addition, in some cases, additional linkers, such as alkyl groups (including substituted and heteroalkyl groups) may be used.

[0104] In this embodiment, the oligonucleotides are synthesized as is known in the art, and then attached to the surface of the solid support. As will be appreciated by those skilled in the art, either the 5′ or 3′ terminus may be attached to the solid support, or attachment may be via an internal nucleoside. In an additional embodiment, the immobilization to the solid support may be very strong, yet non-covalent. For example, biotinylated oligonucleotides can be made, which bind to surfaces covalently coated with streptavidin, resulting in attachment.

[0105] The arrays may be produced according to any convenient methodology, such as preforming the polynucleotide microarray elements and then stably associating them with the surface. Alternatively, the oligonucleotides may be synthesized on the surface, as is known in the art. A number of different array configurations and methods for their production are known to those of skill in the art and disclosed in WO 95/25116 and WO 95/35505 (photolithographic techniques), U.S. Pat. No. 5,445,934 (in situ synthesis by photolithography), U.S. Pat. No. 5,384,261 (in situ synthesis by mechanically directed flow paths); and U.S. Pat. No. 5,700,637 (synthesis by spotting, printing or coupling); the disclosure of which are herein incorporated in their entirety by reference. Another method for coupling DNA to beads uses specific ligands attached to the end of the DNA to link to ligand-binding molecules attached to a bead. Possible ligand-binding partner pairs include biotin-avidin/streptavidin, or various antibody/antigen pairs such as digoxygenin-antidigoxygenin antibody (Smith et al., “Direct Mechanical Measurements of the Elasticity of Single DNA Molecules by Using Magnetic Beads,” Science 258:1122-1126 (1992)). Covalent chemical attachment of DNA to the support can be accomplished by using standard coupling agents to link the 5′-phosphate on the DNA to coated microspheres through a phosphoamidate bond. Methods for immobilization of oligonucleotides to solid-state substrates are well established. See Pease et al., Proc. Natl. Acad. Sci. USA 91(11):5022-5026 (1994). A preferred method of attaching oligonucleotides to solid-state substrates is described by Guo et al., Nucleic Acids Res. 22:5456-5465 (1994). Immobilization can be accomplished either by in situ DNA synthesis (Maskos and Southern, Nucleic Acids Research, 20:1679-1684 (1992) or by covalent attachment of chemically synthesized oligonucleotides (Guo et al., supra) in combination with robotic arraying technologies.

[0106] In addition to the solid-phase technology represented by biochip arrays, gene expression can also be quantified using liquid-phase arrays. One such system is kinetic polymerase chain reaction (PCR). Kinetic PCR allows for the simultaneous amplification and quantification of specific nucleic acid sequences. The specificity is derived from synthetic oligonucleotide primers designed to preferentially adhere to single-stranded nucleic acid sequences bracketing the target site. This pair of oligonucleotide primers form specific, non-covalently bound complexes on each strand of the target sequence. These complexes facilitate in vitro transcription of double-stranded DNA in opposite orientations. Temperature cycling of the reaction mixture creates a continuous cycle of primer binding, transcription, and re-melting of the nucleic acid to individual strands. The result is an exponential increase of the target dsDNA product. This product can be quantified in real time either through the use of an intercalating dye or a sequence specific probe. SYBR® Greene I, is an example of an intercalating dye, that preferentially binds to dsDNA resulting in a concomitant increase in the fluorescent signal. Sequence specific probes, such as used with TaqMan® technology, consist of a fluorochrome and a quenching molecule covalently bound to opposite ends of an oligonucleotide. The probe is designed to selectively bind the target DNA sequence between the two primers. When the DNA strands are synthesized during the PCR reaction, the fluorochrome is cleaved from the probe by the exonuclease activity of the polymerase resulting in signal dequenching. The probe signaling method can be more specific than the intercalating dye method, but in each case, signal strength is proportional to the dsDNA product produced. Each type of quantification method can be used in multi-well liquid phase arrays with each well representing primers and/or probes specific to nucleic acid sequences of interest. When used with messenger RNA preparations of tissues or cell lines, an array of probe/primer reactions can simultaneously quantify the expression of multiple gene products of interest. See Germer, S., et al., Genome Res. 10:258-266 (2000); Heid, C. A., et al., Genome Res. 6, 986-994 (1996).

Expression of CA Proteins

[0107] In a preferred embodiment, CA nucleic acids encoding CA proteins are used to make a variety of expression vectors to express CA proteins which can then be used in screening assays, as described below. The expression vectors may be either self-replicating extrachromosomal vectors or vectors which integrate into a host genome. Generally, these expression vectors include transcriptional and translational regulatory nucleic acid operably linked to the nucleic acid encoding the CA protein. The term “control sequences” refers to DNA sequences necessary for the expression of an operably linked coding sequence in a particular host organism. The control sequences that are suitable for prokaryotes, for example, include a promoter, optionally an operator sequence, and a ribosome binding site. Eukaryotic cells are known to utilize promoters, polyadenylation signals, and enhancers.

[0108] Nucleic acid is “operably linked” when it is placed into a functional relationship with another nucleic acid sequence. For example, DNA for a presequence or secretory leader is operably linked to DNA for a polypeptide if it is expressed as a preprotein that participates in the secretion of the polypeptide; a promoter or enhancer is operably linked to a coding sequence if it affects the transcription of the sequence; or a ribosome binding site is operably linked to a coding sequence if it is positioned so as to facilitate translation. Generally, “operably linked” means that the DNA sequences being linked are contiguous, and, in the case of a secretory leader, contiguous and in reading phase. However, enhancers do not have to be contiguous. Linking is accomplished by ligation at convenient restriction sites. If such sites do not exist, synthetic oligonucleotide adaptors or linkers are used in accordance with conventional practice. The transcriptional and translational regulatory nucleic acid will generally be appropriate to the host cell used to express the CA protein; for example, transcriptional and translational regulatory nucleic acid sequences from Bacillus are preferably used to express the CA protein in Bacillus. Numerous types of appropriate expression vectors, and suitable regulatory sequences are known in the art for a variety of host cells.

[0109] In general, the transcriptional and translational regulatory sequences may include, but are not limited to, promoter sequences, ribosomal binding sites, transcriptional start and stop sequences, translational start and stop sequences, and enhancer or activator sequences. In a preferred embodiment, the regulatory sequences include a promoter and transcriptional start and stop sequences.

[0110] Promoter sequences encode either constitutive or inducible promoters. The promoters may be either naturally occurring promoters or hybrid promoters. Hybrid promoters, which combine elements of more than one promoter, are also known in the art, and are useful in the present invention.

[0111] In addition, the expression vector may comprise additional elements. For example, the expression vector may have two replication systems, thus allowing it to be maintained in two organisms, for example in mammalian or insect cells for expression and in a prokaryotic host for cloning and amplification. Furthermore, for integrating expression vectors, the expression vector contains at least one sequence homologous to the host cell genome, and preferably two homologous sequences that flank the expression construct. The integrating vector may be directed to a specific locus in the host cell by selecting the appropriate homologous sequence for inclusion in the vector. Constructs for integrating vectors are well known in the art.

[0112] In addition, in a preferred embodiment, the expression vector contains a selectable marker gene to allow the selection of transformed host cells. Selection genes are well known in the art and will vary with the host cell used.

[0113] The CA proteins of the present invention are produced by culturing a host cell transformed with an expression vector containing nucleic acid encoding a CA protein, under the appropriate conditions to induce or cause expression of the CA protein. The conditions appropriate for CA protein expression will vary with the choice of the expression vector and the host cell, and will be easily ascertained by one skilled in the art through routine experimentation. For example, the use of constitutive promoters in the expression vector will require optimizing the growth and proliferation of the host cell, while the use of an inducible promoter requires the appropriate growth conditions for induction. In addition, in some embodiments, the timing of the harvest is important. For example, the baculoviral systems used in insect cell expression are lytic viruses, and thus harvest time selection can be crucial for product yield.

[0114] Appropriate host cells include yeast, bacteria, archaebacteria, fungi, and insect, plant and animal cells, including mammalian cells. Of particular interest are Drosophila melanogaster cells, Saccharomyces cerevisiae and other yeasts, E. coli, Bacillus subtilis, Sf9 cells, C129 cells, 293 cells, Neurospora, BHK, CHO, COS, HeLa cells, THP1 cell line (a macrophage cell line) and human cells and cell lines.

[0115] In a preferred embodiment, the CA proteins are expressed in mammalian cells. Mammalian expression systems are also known in the art, and include retroviral systems. A preferred expression vector system is a retroviral vector system such as is generally described in PCT/US97/01019 and PCT/US97/01048, both of which are hereby expressly incorporated by reference. Of particular use as mammalian promoters are the promoters from mammalian viral genes, since the viral genes are often highly expressed and have a broad host range. Examples include the SV40 early promoter, mouse mammary tumor virus LTR promoter, adenovirus major late promoter, herpes simplex virus promoter, and the CMV promoter. Typically, transcription termination and polyadenylation sequences recognized by mammalian cells are regulatory regions located 3′ to the translation stop codon and thus, together with the promoter elements, flank the coding sequence. Examples of transcription terminator and polyadenylation signals include those derived form SV40.

[0116] The methods of introducing exogenous nucleic acid into mammalian hosts, as well as other hosts, are well known in the art, and will vary with the host cell used. Techniques include dextran-mediated transfection, calcium phosphate precipitation, polybrene mediated transfection, protoplast fusion, electroporation, viral infection, encapsulation of the polynucleotide(s) in liposomes, and direct microinjection of the DNA into nuclei.

[0117] In a preferred embodiment, CA proteins are expressed in bacterial systems. Bacterial expression systems are well known in the art. Promoters from bacteriophage may also be used and are known in the art. In addition, synthetic promoters and hybrid promoters are also useful; for example, the tac promoter is a hybrid of the trp and lac promoter sequences. Furthermore, a bacterial promoter can include naturally occurring promoters of non-bacterial origin that have the ability to bind bacterial RNA polymerase and initiate transcription. In addition to a functioning promoter sequence, an efficient ribosome binding site is desirable. The expression vector may also include a signal peptide sequence that provides for secretion of the CA protein in bacteria. The protein is either secreted into the growth media (gram-positive bacteria) or into the periplasmic space, located between the inner and outer membrane of the cell (gram-negative bacteria). The bacterial expression vector may also include a selectable marker gene to allow for the selection of bacterial strains that have been transformed. Suitable selection genes include genes that render the bacteria resistant to drugs such as ampicillin, chloramphenicol, erythromycin, kanamycin, neomycin and tetracycline. Selectable markers also include biosynthetic genes, such as those in the histidine, tryptophan and leucine biosynthetic pathways. These components are assembled into expression vectors. Expression vectors for bacteria are well known in the art, and include vectors for Bacillus subtilis, E. coli, Streptococcus cremoris, and Streptococcus lividans, among others. The bacterial expression vectors are transformed into bacterial host cells using techniques well known in the art, such as calcium chloride treatment, electroporation, and others.

[0118] In one embodiment, CA proteins are produced in insect cells. Expression vectors for the transformation of insect cells, and in particular, baculovirus-based expression vectors, are well known in the art.

[0119] In a preferred embodiment, CA protein is produced in yeast cells. Yeast expression systems are well known in the art, and include expression vectors for Saccharomyces cerevisiae, Candida albicans and C. maltosa, Hansenula polymorpha, Kluyveromyces fragilis and K. lactis, Pichia guillerimondii and P. pastoris, Schizosaccharomyces pombe, and Yarrowia lipolytica.

[0120] The CA protein may also be made as a fusion protein, using techniques well known in the art. Thus, for example, for the creation of monoclonal antibodies. If the desired epitope is small, the CA protein may be fused to a carrier protein to form an immunogen. Alternatively, the CA protein may be made as a fusion protein to increase expression, or for other reasons. For example, when the CA protein is a CA peptide, the nucleic acid encoding the peptide may be linked to other nucleic acid for expression purposes.

[0121] In one embodiment, the CA nucleic acids, proteins and antibodies of the invention are labeled. By “labeled” herein is meant that a compound has at least one element, isotope or chemical compound attached to enable the detection of the compound. In general, labels fall into three classes: a) isotopic labels, which may be radioactive or heavy isotopes; b) immune labels, which may be antibodies or antigens; and c) colored or fluorescent dyes. The labels may be incorporated into the CA nucleic acids, proteins and antibodies at any position. For example, the label should be capable of producing, either directly or indirectly, a detectable signal. The detectable moiety may be a radioisotope, such as ³H, ¹⁴C, ³²P, ³⁵S, or ¹²⁵I, a fluorescent or chemiluminescent compound, such as fluorescein isothiocyanate, rhodamine, or luciferin, or an enzyme, such as alkaline phosphatase, beta-galactosidase or horseradish peroxidase. Any method known in the art for conjugating the antibody to the label may be employed, including those methods described by Hunter et al., Nature, 144:945 (1962); David et al., Biochemistry, 13:1014 (1974); Pain et al., J. Immunol. Meth., 40:219 (1981); and Nygren, J. Histochem. and Cytochem., 30:407 (1982).

[0122] Accordingly, the present invention also provides CA protein sequences. A CA protein of the present invention may be identified in several ways. “Protein” in this sense includes proteins, polypeptides, and peptides. As will be appreciated by those in the art, the nucleic acid sequences of the invention can be used to generate protein sequences. There are a variety of ways to do this, including cloning the entire gene and verifying its frame and amino acid sequence, or by comparing it to known sequences to search for homology to provide a frame, assuming the CA protein has homology to some protein in the database being used. Generally, the nucleic acid sequences are input into a program that will search all three frames for homology. This is done in a preferred embodiment using the following NCBI Advanced BLAST parameters. The program is blastx or blastn. The database is nr. The input data is as “Sequence in FASTA format”. The organism list is “none”. The “expect” is 10; the filter is default. The “descriptions” is 500, the “alignments” is 500, and the “alignment view” is pairwise. The “query Genetic Codes” is standard (1). The matrix is BLOSUM 62; gap existence cost is 11, per residue gap cost is 1; and the lambda ratio is 0.85 default. This results in the generation of a putative protein sequence.

[0123] In general, the term “polypeptide” as used herein refers to both the full-length polypeptide encoded by the recited polynucleotide, the polypeptide encoded by the gene represented by the recited polynucleotide, as well as portions or fragments thereof. The present invention encompasses variants of the naturally occurring proteins, wherein such variants are homologous or substantially similar to the naturally occurring protein, and can be of an origin of the same or different species as the naturally occurring protein (e.g., human, murine, or some other species that naturally expresses the recited polypeptide, usually a mammalian species). In general, variant polypeptides have a sequence that has at least about 80%, at least about 81%, at least about 82%, at least about 83%, at least about 84%, at least about 85%, at least about 86%, at least about 87%, at least about 88%, at least about 89%, usually at least about 90%, at least 91%, at least 92%, at least 93%, at least 94%, at least 95%, at least 96%, at least 97%, at least 98% and more usually at least about 99% sequence identity with a differentially expressed polypeptide described herein, as determined by the Smith-Waterman homology search algorithm using an affine gap search with a gap open penalty of 12 and a gap extension penalty of 2, BLOSUM matrix of 62. The Smith-Waterman homology search algorithm is taught in Smith and Waterman, Adv. Appl. Math. (1981) 2: 482-489. The variant polypeptides can be naturally or non-naturally glycosylated, i.e., the polypeptide has a glycosylation pattern that differs from the glycosylation pattern found in the corresponding naturally occurring protein.

[0124] Also within the scope of the invention are variants. Variants of polypeptides include mutants, fragments, and fusions. Mutants can include amino acid substitutions, additions or deletions. The amino acid substitutions can be conservative amino acid substitutions or substitutions to eliminate non-essential amino acids, such as to alter a glycosylation site, a phosphorylation site or an acetylation site, or to minimize misfolding by substitution or deletion of one or more cysteine residues that are not necessary for function. Conservative amino acid substitutions are those that preserve the general charge, hydrophobicity/hydrophilicity, and/or steric bulk of the amino acid substituted. Variants can be designed so as to retain or have enhanced biological activity of a particular region of the protein (e.g., a functional domain and/or, where the polypeptide is a member of a protein family, a region associated with a consensus sequence). Selection of amino acid alterations for production of variants can be based upon the accessibility (interior vs. exterior) of the amino acid (see, e.g., Go et al, Int. J. Peptide Protein Res. (1980) 15:211), the thermostability of the variant polypeptide (see, e.g., Querol et al., Prot. Eng. (1996) 9:265), desired glycosylation sites (see, e.g., Olsen and Thomsen, J. Gen. Microbiol. (1991) 137:579), desired disulfide bridges (see, e.g., Clarke et al., Biochemistry (1993) 32:4322; and Wakarchuk et al., Protein Eng. (1994) 7:1379), desired metal binding sites (see, e.g., Toma et al., Biochemistry (1991) 30:97, and Haezerbrouck et al., Protein Eng. (1993) 6:643), and desired substitutions within proline loops (see, e.g., Masul et al., Appl. Env. Microbiol. (1994) 60:3579). Cysteine-depleted muteins can be produced as disclosed in U.S. Pat. No. 4,959,314.

[0125] Variants also include fragments of the polypeptides disclosed herein, particularly biologically active fragments and/or fragments corresponding to functional domains. Fragments of interest will typically be at least about 8 amino acids (aa) 10 aa, 15 aa, 20 aa, 25 aa, 30 aa, 35 aa, 40 aa, to at least about 45 aa in length, usually at least about 50 aa in length, at least about 75 aa, at least about 100 aa, at least about 125 aa, at least about 150 aa in length, at least about 200 aa, at least about 300 aa, at least about 400 aa and can be as long as 500 aa in length or longer, but will usually not exceed about 1000 aa in length, where the fragment will have a stretch of amino acids that is identical to a polypeptide encoded by a polynucleotide having a sequence of any one of the polynucleotide sequences provided herein, or a homolog thereof. The protein variants described herein are encoded by polynucleotides that are within the scope of the invention. The genetic code can be used to select the appropriate codons to construct the corresponding variants.

[0126] While altered expression of the polynucleotides associated with cancer is observed, altered levels of expression of the polypeptides encoded by these polynucleotides may likely play a role in cancers.

[0127] Also included within one embodiment of CA proteins are amino acid variants of the naturally occurring sequences, as determined herein. Preferably, the variants are preferably greater than about 75% homologous to the wild-type sequence, more preferably greater than about 80%, even more preferably greater than about 85% and most preferably greater than 90%. The present application is also directed to proteins containing polypeptides at least 80%, 85%, 90%, 95%, 96%, 97%, 98% or 99% identical to a CA polypeptide sequence set forth herein. As for nucleic acids, homology in this context means sequence similarity or identity, with identity being preferred. This homology will be determined using standard techniques known in the art as are outlined above for the nucleic acid homologies.

[0128] CA proteins of the present invention may be shorter or longer than the wild type amino acid sequences. Thus, in a preferred embodiment, included within the definition of CA proteins are portions or fragments of the wild type sequences herein. In addition, as outlined above, the CA nucleic acids of the invention may be used to obtain additional coding regions, and thus additional protein sequence, using techniques known in the art.

[0129] In a preferred embodiment, the CA proteins are derivative or variant CA proteins as compared to the wild-type sequence. That is, as outlined more fully below, the derivative CA peptide will contain at least one amino acid substitution, deletion or insertion, with amino acid substitutions being particularly preferred. The amino acid substitution, insertion or deletion may occur at any residue within the CA peptide.

[0130] Also included in an embodiment of CA proteins of the present invention are amino acid sequence variants. These variants fall into one or more of three classes: substitutional, insertional or deletional variants. These variants ordinarily are prepared by site-specific mutagenesis of nucleotides in the DNA encoding the CA protein, using cassette or PCR mutagenesis or other techniques well known in the art, to produce DNA encoding the variant, and thereafter expressing the DNA in recombinant cell culture as outlined above. However, variant CA protein fragments having up to about 100-150 residues may be prepared by in vitro synthesis using established techniques. Amino acid sequence variants are characterized by the predetermined nature of the variation, a feature that sets them apart from naturally occurring allelic or interspecies variation of the CA protein amino acid sequence. The variants typically exhibit the same qualitative biological activity as the naturally occurring analogue, although variants can also be selected which have modified characteristics as will be more fully outlined below.

[0131] While the site or region for introducing an amino acid sequence variation is predetermined, the mutation per se need not be predetermined. For example, in order to optimize the performance of a mutation at a given site, random mutagenesis may be conducted at the target codon or region and the expressed CA variants screened for the optimal combination of desired activity. Techniques for making substitution mutations at predetermined sites in DNA having a known sequence are well known, for example, M13 primer mutagenesis and LAR mutagenesis. Screening of the mutants is done using assays of CA protein activities.

[0132] Amino acid substitutions are typically of single residues; insertions usually will be on the order of from about 1 to 20 amino acids, although considerably larger insertions may be tolerated. Deletions range from about 1 to about 20 residues, although in some cases deletions may be much larger.

[0133] Substitutions, deletions, insertions or any combination thereof may be used to arrive at a final derivative. Generally these changes are done on a few amino acids to minimize the alteration of the molecule. However, larger changes may be tolerated in certain circumstances. When small alterations in the characteristics of the CA protein are desired, substitutions are generally made in accordance with the following chart:

CHART 1

| Original Residue | Exemplary Substitutions |
|---|---|
| Ala | Ser |
| Arg | Lys |
| Asn | Gln, His |
| Asp | Glu |
| Cys | Ser |
| Gln | Asn |
| Glu | Asp |
| Gly | Pro |
| His | Asn, Gln |
| Ile | Leu, Val |
| Leu | Ile, Val |
| Lys | Arg, Gln, Glu |
| Met | Leu, Ile |
| Phe | Met, Leu, Tyr |
| Ser | Thr |
| Thr | Ser |
| Trp | Tyr |
| Tyr | Trp, Phe |
| Val | Ile, Leu |

[0134] Substantial changes in function or immunological identity are made by selecting substitutions that are less conservative than those shown in Chart I. For example, substitutions may be made full length to more significantly affect one or more of the following: the structure of the polypeptide backbone in the area of the alteration (e.g., the alpha-helical or beta-sheet structure); the charge or hydrophobicity of the molecule at the target site; and the bulk of the side chain. The substitutions which in general are expected to produce the greatest changes in the polypeptide's properties are those in which (a) a hydrophilic residue, e.g. seryl or threonyl is substituted for (or by) a hydrophobic residue, e.g. leucyl, isoleucyl, phenylalanyl, valyl or alanyl; (b) a cysteine or proline is substituted for (or by) any other residue; (c) a residue having an electropositive side chain, e.g. lysyl, arginyl, or histidyl, is substituted for (or by) an electronegative residue, e.g. glutamyl or aspartyl; or (d) a residue having a bulky side chain, e.g. phenylalanine, is substituted for (or by) one not having a side chain, e.g. glycine.

[0135] The variants typically exhibit the same qualitative biological activity and will elicit the same immune response as the naturally-occurring analogue, although variants also are selected to modify the characteristics of the CA proteins as needed. Alternatively, the variant may be designed such that the biological activity of the CA protein is altered. For example, glycosylation sites may be altered or removed, dominant negative mutations created, etc.

[0136] Covalent modifications of CA polypeptides are included within the scope of this invention, for example for use in screening. One type of covalent modification includes reacting targeted amino acid residues of a CA polypeptide with an organic derivatizing agent that is capable of reacting with selected side chains or the N- or C-terminal residues of a CA polypeptide. Derivatization with bifunctional agents is useful, for instance, for crosslinking CA polypeptides to a water-insoluble support matrix or surface for use in the method for purifying anti-CA antibodies or screening assays, as is more fully described below. Commonly used crosslinking agents include, e.g., 1,1-bis(diazoacetyl)-2-phenylethane, glutaraldehyde, N-hydroxysuccinimide esters, for example, esters with 4-azidosalicylic acid, homobifunctional imidoesters, including disuccinimidyl esters such as 3,3′-dithiobis(succinimidylpropionate), bifunctional maleimides such as bis-N-maleimido-1,8-octane and agents such as methyl-3-[(p-azidophenyl)dithio]propioimidate.

[0137] Other modifications include deamidation of glutaminyl and asparaginyl residues to the corresponding glutamyl and aspartyl residues, respectively, hydroxylation of proline and lysine, phosphorylation of hydroxyl groups of seryl, threonyl or tyrosyl residues, methylation of the a-amino groups of lysine, arginine, and histidine side chains [T. E. Creighton, Proteins: Structure and Molecular Properties, W.H. Freeman & Co., San Francisco, pp. 79-86 (1983)], acetylation of the N-terminal amine, and amidation of any C-terminal carboxyl group.

[0138] Another type of covalent modification of the CA polypeptide included within the scope of this invention comprises altering the native glycosylation pattern of the polypeptide. “Altering the native glycosylation pattern” is intended for purposes herein to mean deleting one or more carbohydrate moieties found in native sequence CA polypeptide, and/or adding one or more glycosylation sites that are not present in the native sequence CA polypeptide.

[0139] Addition of glycosylation sites to CA polypeptides may be accomplished by altering the amino acid sequence thereof. The alteration may be made, for example, by the addition of, or substitution by, one or more serine or threonine residues to the native sequence CA polypeptide (for O-linked glycosylation sites). The CA amino acid sequence may optionally be altered through changes at the DNA level, particularly by mutating the DNA encoding the CA polypeptide at preselected bases such that codons are generated that will translate into the desired amino acids.

[0140] Another means of increasing the number of carbohydrate moieties on the CA polypeptide is by chemical or enzymatic coupling of glycosides to the polypeptide. Such methods are described in the art, e.g., in WO 87/05330 published 11 Sep. 1987, and in Aplin and Wriston, LA Crit. Rev. Biochem., pp. 259-306 (1981).

[0141] Removal of carbohydrate moieties present on the CA polypeptide may be accomplished chemically or enzymatically or by mutational substitution of codons encoding for amino acid residues that serve as targets for glycosylation. Chemical deglycosylation techniques are known in the art and described, for instance, by Hakimuddin, et al., Arch. Biochem. Biophys., 259:52 (1987) and by Edge et al., Anal. Biochem., 118:131 (1981). Enzymatic cleavage of carbohydrate moieties on polypeptides can be achieved by the use of a variety of endo-and exo-glycosidases as described by Thotakura et al., Meth. Enzymol., 138:350 (1987).

[0142] Another type of covalent modification of CA comprises linking the CA polypeptide to one of a variety of nonproteinaceous polymers, e.g., polyethylene glycol, polypropylene glycol, or polyoxyalkylenes, in the manner set forth in U.S. Pat. Nos. 4,640,835; 4,496,689; 4,301,144; 4,670,417; 4,791,192 or 4,179,337.

[0143] CA polypeptides of the present invention may also be modified in a way to form chimeric molecules comprising a CA polypeptide fused to another, heterologous polypeptide or amino acid sequence. In one embodiment, such a chimeric molecule comprises a fusion of a CA polypeptide with a tag polypeptide that provides an epitope to which an anti-tag antibody can selectively bind. The epitope tag is generally placed at the amino- or carboxyl-terminus of the CA polypeptide, although internal fusions may also be tolerated in some instances. The presence of such epitope-tagged forms of a CA polypeptide can be detected using an antibody against the tag polypeptide. Also, provision of the epitope tag enables the CA polypeptide to be readily purified by affinity purification using an anti-tag antibody or another type of affinity matrix that binds to the epitope tag. In an alternative embodiment, the chimeric molecule may comprise a fusion of a CA polypeptide with an immunoglobulin or a particular region of an immunoglobulin. For a bivalent form of the chimeric molecule, such a fusion could be to the Fc region of an IgG molecule.

[0144] Various tag polypeptides and their respective antibodies are well known in the art. Examples include poly-histidine (poly-his) or poly-histidine-glycine (poly-his-gly) tags; the flu HA tag polypeptide and its antibody 12CA5 [Field et al., Mol. Cell. Biol., 8:2159-2165 (1988)]; the c-myc tag and the 8F9, 3C7, 6E10, G4, B7 and 9E10 antibodies thereto [Evan et al., Molecular and Cellular Biology, 5:3610-3616 (1985)]; and the Herpes Simplex virus glycoprotein D (gD) tag and its antibody [Paborsky et al., Protein Engineering, 3(6):547-553 (1990)]. Other tag polypeptides include the Flag-peptide [Hopp et al., BioTechnology, 6:1204-1210 (1988)]; the KT3 epitope peptide [Martin et al., Science, 255:192-194 (1992)]; tubulin epitope peptide [Skinner et al., J. Biol. Chem., 266:15163-15166 (1991)]; and the T7 gene 10 protein peptide tag [Lutz-Freyermuth et al., Proc. Natl. Acad. Sci. USA, 87:6393-6397 (1990)].

[0145] Also included with the definition of CA protein in one embodiment are other CA proteins of the CA family, and CA proteins from other organisms, which are cloned and expressed as outlined below. Thus, probe or degenerate polymerase chain reaction (PCR) primer sequences may be used to find other related CA proteins from humans or other organisms. As will be appreciated by those in the art, particularly useful probe and/or PCR primer sequences include the unique areas of the CA nucleic acid sequence. As is generally known in the art, preferred PCR primers are from about 15 to about 35 nucleotides in length, with from about 20 to about 30 being preferred, and may contain inosine as needed. The conditions for the PCR reaction are well known in the art.

[0146] In addition, as is outlined herein, CA proteins can be made that are longer than those encoded by the nucleic acids of the figures, for example, by the elucidation of additional sequences, the addition of epitope or purification tags, the addition of other fusion sequences, etc.

[0147] CA proteins may also be identified as being encoded by CA nucleic acids. Thus, CA proteins are encoded by nucleic acids that will hybridize to the sequences of the sequence listings, or their complements, as outlined herein.

CA Antigens and Antibodies Thereto

[0148] In one embodiment, the invention provides CA specific antibodies. In a preferred embodiment, when the CA protein is to be used to generate antibodies, for example for immunotherapy, the CA protein should share at least one epitope or determinant with the full-length protein. By “epitope” or “determinant” herein is meant a portion of a protein that will generate and/or bind an antibody or T-cell receptor in the context of MHC. Thus, in most instances, antibodies made to a smaller CA protein will be able to bind to the full-length protein. In a preferred embodiment, the epitope is unique; that is, antibodies generated to a unique epitope show little or no cross-reactivity.

[0149] Any polypeptide sequence encoded by the CA polynucleotide sequences may be analyzed to determine certain preferred regions of the polypeptide. Regions of high antigenicity are determined from data by DNASTAR analysis by choosing values that represent regions of the polypeptide that are likely to be exposed on the surface of the polypeptide in an environment in which antigen recognition may occur in the process of initiation of an immune response. For example, the amino acid sequence of a polypeptide encoded by a CA polynucleotide sequence may be analyzed using the default parameters of the DNASTAR computer algorithm (DNASTAR, Inc., Madison, Wis.; http://www.dnastar.com/).

[0150] Polypeptide features that may be routinely obtained using the DNASTAR computer algorithm include, but are not limited to, Garnier-Robson alpha-regions, beta-regions, turn-regions, and coil-regions (Garnier et al. J. Mol. Biol., 120: 97 (1978)); Chou-Fasman alpha-regions, beta-regions, and turn-regions (Adv. in Enzymol., 47:45-148 (1978)); Kyte-Doolittle hydrophilic regions and hydrophobic regions (J. Mol. Biol., 157:105-132 (1982)); Eisenberg alpha- and beta-amphipathic regions; Karplus-Schulz flexible regions; Emini surface-forming regions (J. Virol., 55(3):836-839 (1985)); and Jameson-Wolf regions of high antigenic index (CABIOS, 4(1):181-186 (1988)). Kyte-Doolittle hydrophilic regions and hydrophobic regions, Emini surface-forming regions, and Jameson-Wolf regions of high antigenic index (i.e., containing four or more contiguous amino acids having an antigenic index of greater than or equal to 1.5, as identified using the default parameters of the Jameson-Wolf program) can routinely be used to determine polypeptide regions that exhibit a high degree of potential for antigenicity. One approach for preparing antibodies to a protein is the selection and preparation of an amino acid sequence of all or part of the protein, chemically synthesizing the sequence and injecting it into an appropriate animal, typically a rabbit, hamster or a mouse. Oligopeptides can be selected as candidates for the production of an antibody to the CA protein based upon the oligopeptides lying in hydrophilic regions, which are thus likely to be exposed in the mature protein. Additional oligopeptides can be determined using, for example, the Antigenicity Index, Welling, G. W. et al., FEBS Lett. 188:215-218 (1985), incorporated herein by reference.

[0151] In one embodiment, the term “antibody” includes antibody fragments, as are known in the art, including Fab, Fab₂, single chain antibodies (Fv for example), chimeric antibodies, etc., either produced by the modification of whole antibodies or those synthesized de novo using recombinant DNA technologies.

[0152] Methods of preparing polyclonal antibodies are known to the skilled artisan. Polyclonal antibodies can be raised in a mammal, for example, by one or more injections of an immunizing agent and, if desired, an adjuvant. Typically, the immunizing agent and/or adjuvant will be injected in the mammal by multiple subcutaneous or intraperitoneal injections. The immunizing agent may include a protein encoded by a nucleic acid of the figures or fragment thereof or a fusion protein thereof. It may be useful to conjugate the immunizing agent to a protein known to be immunogenic in the mammal being immunized. Examples of such immunogenic proteins include but are not limited to keyhole limpet hemocyanin, serum albumin, bovine thyroglobulin, and soybean trypsin inhibitor. Examples of adjuvants that may be employed include Freund's complete adjuvant and MPL-TDM adjuvant (monophosphoryl Lipid A, synthetic trehalose dicorynomycolate). The immunization protocol may be selected by one skilled in the art without undue experimentation.

[0153] The antibodies may, alternatively, be monoclonal antibodies. Monoclonal antibodies may be prepared using hybridoma methods, such as those described by Kohler and Milstein, Nature, 256:495 (1975). In a hybridoma method, a mouse, hamster, or other appropriate host animal, is typically immunized with an immunizing agent to elicit lymphocytes that produce or are capable of producing antibodies that will specifically bind to the immunizing agent. Alternatively, the lymphocytes may be immunized in vitro. The immunizing agent will typically include a polypeptide encoded by a nucleic acid of Tables 1-124, or fragment thereof or a fusion protein thereof. Generally, either peripheral blood lymphocytes (“PBLs”) are used if cells of human origin are desired, or spleen cells or lymph node cells are used if non-human mammalian sources are desired. The lymphocytes are then fused with an immortalized cell line using a suitable fusing agent, such as polyethylene glycol, to form a hybridoma cell (Goding, Monoclonal Antibodies: Principles and Practice, Academic Press, (1986) pp. 59-103). Immortalized cell lines are usually transformed mammalian cells, particularly myeloma cells of rodent, bovine and human origin. Usually, rat or mouse myeloma cell lines are employed. The hybridoma cells may be cultured in a suitable culture medium that preferably contains one or more substances that inhibit the growth or survival of the unfused, immortalized cells. For example, if the parental cells lack the enzyme hypoxanthine guanine phosphoribosyl transferase (HGPRT or HPRT), the culture medium for the hybridomas typically will include hypoxanthine, aminopterin, and thymidine (“HAT medium”), which substances prevent the growth of HGPRT-deficient cells.

[0154] Monoclonal antibody technology is used in implementing research, diagnosis and therapy. Monoclonal antibodies are used in radioimmunoassays, enzyme-linked immunosorbent assays, immunocytopathology, and flow cytometry for in vitro diagnosis, and in vivo for diagnosis and immunotherapy of human disease. Waldmann, T. A. (1991) Science 252:1657-1662. In particular, monoclonal antibodies have been widely applied to the diagnosis and therapy of cancer, wherein it is desirable to target malignant lesions while avoiding normal tissue. See, e.g., U.S. Pat. No. 4,753,894 to Frankel, et al.; U.S. Pat. No. 4,938,948 to Ring et al.; and U.S. Pat. No. 4,956,453 to Bjorn et al. In one embodiment, the antibodies are bispecific antibodies. Bispecific antibodies are monoclonal, preferably human or humanized, antibodies that have binding specificities for at least two different antigens. A number of “humanized” antibody molecules comprising an antigen-binding site derived from a non-human immunoglobulin have been described, including chimeric antibodies having rodent V regions and their associated CDRs fused to human constant domains (Winter et al. (1991) Nature 349:293-299; Lobuglio et al. (1989) Proc. Nat. Acad. Sci. USA 86:4220-4224; Shaw et al. (1987) J Immunol. 138:4534-4538; and Brown et al. (1987) Cancer Res. 47:3577-3583), rodent CDRs grafted into a human supporting FR prior to fusion with an appropriate human antibody constant domain (Riechmann et al. (1988) Nature 332:323-327; Verhoeyen et al. (1988) Science 239:1534-1536; and Jones et al. (1986) Nature 321:522-525), and rodent CDRs supported by recombinantly veneered rodent FRs (European Patent Publication No. 519,596, published Dec. 23, 1992). These “humanized” molecules are designed to minimize unwanted immunological response toward rodent antihuman antibody molecules which limits the duration and effectiveness of therapeutic applications of those moieties in human recipients. In the present case, one of the binding specificities is for a protein encoded by a nucleic acid of Tables 1-124, or a fragment thereof, the other one is for any other antigen, and preferably for a cell-surface protein or receptor or receptor subunit, preferably one that is tumor specific.

[0155] In a preferred embodiment, the antibodies to CA are capable of reducing or eliminating the biological function of CA, as is described below. That is, the addition of anti-CA antibodies (either polyclonal or preferably monoclonal) to CA (or cells containing CA) may reduce or eliminate the CA activity. Generally, at least a 25% decrease in activity is preferred, with at least about 50% being particularly preferred and about a 95-100% decrease being especially preferred.

[0156] In a preferred embodiment the antibodies to the CA proteins are humanized antibodies. “Humanized” antibodies refer to a molecule having an antigen binding site that is substantially derived from an immunoglobulin from a non-human species and the remaining immunoglobulin structure of the molecule based upon the structure and/or sequence of a human immunoglobulin. The antigen binding site may comprise either complete variable domains fused onto constant domains or only the complementarity determining regions (CDRs) grafted onto appropriate framework regions in the variable domains. Antigen binding sites may be wild type or modified by one or more amino acid substitutions, e.g., modified to resemble human immunoglobulin more closely. Alternatively, a humanized antibody may be derived from a chimeric antibody that retains or substantially retains the antigen-binding properties of the parental, non-human, antibody but which exhibits diminished immunogenicity as compared to the parental antibody when administered to humans. The phrase “chimeric antibody,” as used herein, refers to an antibody containing sequence derived from two different antibodies (see, e.g., U.S. Pat. No. 4,816,567) that typically originate from different species. Typically, in these chimeric antibodies, the variable region of both light and heavy chains mimics the variable regions of antibodies derived from one species of mammals, while the constant portions are homologous to the sequences in antibodies derived from another. Most typically, chimeric antibodies comprise human and murine antibody fragments, generally human constant and mouse variable regions. Humanized antibodies include human immunoglobulins (recipient antibody) in which residues form a complementary determining region (CDR) of the recipient are replaced by residues from a CDR of a non-human species (donor antibody) such as mouse, rat or rabbit having the desired specificity, affinity and capacity. In some instances, Fv framework residues of the human immunoglobulin are replaced by corresponding non-human residues. Humanized antibodies may also comprise residues that are found neither in the recipient antibody nor in the imported CDR or framework sequences. In general, the humanized antibody will comprise substantially all of at least one, and typically two, variable domains, in which all or substantially all of the CDR regions correspond to those of a non-human immunoglobulin and all or substantially all of the framework residues (FR) regions are those of a human immunoglobulin consensus sequence. The humanized antibody optimally also will comprise at least a portion of an immunoglobulin constant region (Fc), typically that of a human immunoglobulin (Jones et al., Nature, 321:522-525 (1986); Riechmann et al., Nature, 332:323-329 (1988); and Presta, Curr. Op. Struct. Biol., 2:593-596 (1992)). One clear advantage to such chimeric forms is that, for example, the variable regions can conveniently be derived from presently known sources using readily available hybridomas or B cells from non human host organisms in combination with constant regions derived from, for example, human cell preparations. While the variable region has the advantage of ease of preparation, and the specificity is not affected by its source, the constant region being human, is less likely to elicit an immune response from a human subject when the antibodies are injected than would the constant region from a non-human source. However, the definition is not limited to this particular example.

[0157] Because humanized antibodies are far less immunogenic in humans than the parental mouse monoclonal antibodies, they can be used for the treatment of humans with far less risk of anaphylaxis. Thus, these antibodies may be preferred in therapeutic applications that involve in vivo administration to a human such as, e.g., use as radiation sensitizers for the treatment of neoplastic disease or use in methods to reduce the side effects of, e.g., cancer therapy. Methods for humanizing non-human antibodies are well known in the art. Generally, a humanized antibody has one or more amino acid residues introduced into it from a source that is non-human. These non-human amino acid residues are often referred to as import residues, which are typically taken from an import variable domain. Humanization can be essentially performed following the method of Winter and co-workers (Jones et al., Nature 321:522-525 (1986); Riechmann et al., Nature 332:323-327 (1988); Verhoeyen et al., Science 239:1534-1536 (1988)), by substituting rodent CDRs or CDR sequences for the corresponding sequences of a human antibody. Accordingly, such humanized antibodies are chimeric antibodies (U.S. Pat. No. 4,816,567), wherein substantially less than an intact human variable domain has been substituted by the corresponding sequence from a non-human species. In practice, humanized antibodies are typically human antibodies in which some CDR residues and possibly some FR residues are substituted by residues from analogous sites in rodent antibodies.

[0158] Human antibodies can also be produced using various techniques known in the art, including phage display libraries [Hoogenboom and Winter, J. Mol. Biol., 227:381 (1991); Marks et al., J. Mol. Biol., 222:581 (1991)]. The techniques of Cole et al. and Boerner et al. are also available for the preparation of human monoclonal antibodies [Cole et al., Monoclonal Antibodies and Cancer Therapy, Alan R. Liss, p. 77 (1985) and Boerner et al., J. Immunol., 147(1):86-95 (1991)]. Humanized antibodies may be achieved by a variety of methods including, for example: (1) grafting the non-human complementarity determining regions (CDRs) onto a human framework and constant region (a process referred to in the art as “humanizing”), or, alternatively, (2) transplanting the entire non-human variable domains, but “cloaking” them with a human-like surface by replacement of surface residues (a process referred to in the art as “veneering”). In the present invention, humanized antibodies will include both “humanized” and “veneered” antibodies. Similarly, human antibodies can be made by introducing human immunoglobulin loci into transgenic animals, e.g., mice in which the endogenous immunoglobulin genes have been partially or completely inactivated. Upon challenge, human antibody production is observed, which closely resembles that seen in humans in all respects, including gene rearrangement, assembly, and antibody repertoire. This approach is described, for example, in U.S. Pat. Nos. 5,545,807; 5,545,806; 5,569,825; 5,625,126; 5,633,425; 5,661,016, and in the following scientific publications: Marks et al., Bio/Technology 10, 779-783 (1992); Lonberg et al., Nature 368 856-859 (1994); Morrison, Nature 368, 812-13 (1994); Fishwild et al., Nature Biotechnology 14, 845-51 (1996); Neuberger, Nature Biotechnology 14, 826 (1996); Lonberg and Huszar, Intern. Rev. Immunol. 13 65-93 (1995); Jones et al., Nature 321:522-525 (1986); Morrison et al., Proc. Natl. Acad. Sci, U.S.A., 81:6851-6855 (1984); Morrison and Oi, Adv. Immunol., 44:65-92 (1988); Verhoeyer et al., Science 239:1534-1536 (1988); Padlan, Molec. Immun. 28:489-498 (1991); Padlan, Molec. Immunol. 31(3):169-217 (1994); and Kettleborough, C. A. et al., Protein Eng. 4(7):773-83 (1991) each of which is incorporated herein by reference.

[0159] The phrase “complementarity determining region” refers to amino acid sequences which together define the binding affinity and specificity of the natural Fv region of a native immunoglobulin binding site. See, e.g., Chothia et al., J. Mol. Biol. 196:901-917 (1987); Kabat et al., U.S. Dept. of Health and Human Services NIH Publication No. 91-3242 (1991). The phrase “constant region” refers to the portion of the antibody molecule that confers effector functions. In the present invention, mouse constant regions are substituted by human constant regions. The constant regions of the subject humanized antibodies are derived from human immunoglobulins. The heavy chain constant region can be selected from any of the five isotypes: alpha, delta, epsilon, gamma or mu. One method of humanizing antibodies comprises aligning the non-human heavy and light chain sequences to human heavy and light chain sequences, selecting and replacing the non-human framework with a human framework based on such alignment, molecular modeling to predict the conformation of the humanized sequence and comparing to the conformation of the parent antibody. This process is followed by repeated back mutation of residues in the CDR region that disturb the structure of the CDRs until the predicted conformation of the humanized sequence model closely approximates the conformation of the non-human CDRs of the parent non-human antibody. Such humanized antibodies may be further derivatized to facilitate uptake and clearance, e.g, via Ashwell receptors. See, e.g., U.S. Pat. Nos. 5,530,101 and 5,585,089 which are incorporated herein by reference.

[0160] Humanized antibodies to CA polypeptides can also be produced using transgenic animals that are engineered to contain human immunoglobulin loci. For example, WO 98/24893 discloses transgenic animals having a human Ig locus wherein the animals do not produce functional endogenous immunoglobulins due to the inactivation of endogenous heavy and light chain loci. WO 91/10741 also discloses transgenic non-primate mammalian hosts capable of mounting an immune response to an immunogen, wherein the antibodies have primate constant and/or variable regions, and wherein the endogenous immunoglobulin-encoding loci are substituted or inactivated. WO 96/30498 discloses the use of the Cre/Lox system to modify the immunoglobulin locus in a mammal, such as to replace all or a portion of the constant or variable region to form a modified antibody molecule. WO 94/02602 discloses non-human mammalian hosts having inactivated endogenous Ig loci and functional human Ig loci. U.S. Pat. No. 5,939,598 discloses methods of making transgenic mice in which the mice lack endogenous heavy chains, and express an exogenous immunoglobulin locus comprising one or more xenogeneic constant regions.

[0161] Using a transgenic animal described above, an immune response can be produced to a selected antigenic molecule, and antibody-producing cells can be removed from the animal and used to produce hybridomas that secrete human monoclonal antibodies. Immunization protocols, adjuvants, and the like are known in the art, and are used in immunization of, for example, a transgenic mouse as described in WO 96/33735. The monoclonal antibodies can be tested for the ability to inhibit or neutralize the biological activity or physiological effect of the corresponding protein.

[0162] In the present invention, CA polypeptides of the invention and variants thereof are used to immunize a transgenic animal as described above. Monoclonal antibodies are made using methods known in the art, and the specificity of the antibodies is tested using isolated CA polypeptides. Methods for preparation of the human or primate CA or an epitope thereof include, but are not limited to chemical synthesis, recombinant DNA techniques or isolation from biological samples. Chemical synthesis of a peptide can be performed, for example, by the classical Merrifeld method of solid phase peptide synthesis (Merrifeld, J. Am. Chem. Soc. 85:2149, 1963 which is incorporated by reference) or the FMOC strategy on a Rapid Automated Multiple Peptide Synthesis system (E. I. du Pont de Nemours Company, Wilmington, Del.) (Caprino and Han, J. Org. Chem. 37:3404, 1972 which is incorporated by reference).

[0163] Polyclonal antibodies can be prepared by immunizing rabbits or other animals by injecting antigen followed by subsequent boosts at appropriate intervals. The animals are bled and sera assayed against purified CA proteins usually by ELISA or by bioassay based upon the ability to block the action of CA proteins. When using avian species, e.g., chicken, turkey and the like, the antibody can be isolated from the yolk of the egg. Monoclonal antibodies can be prepared after the method of Milstein and Kohler by fusing splenocytes from immunized mice with continuously replicating tumor cells such as myeloma or lymphoma cells. (Milstein and Kohler, Nature 256:495-497, 1975; Gulfre and Milstein, Methods in Enzymology: Immunochemical Techniques 73:1-46, Langone and Banatis eds., Academic Press, 1981 which are incorporated by reference). The hybridoma cells so formed are then cloned by limiting dilution methods and supernates assayed for antibody production by ELISA, RIA or bioassay.

[0164] The unique ability of antibodies to recognize and specifically bind to target proteins provides an approach for treating an overexpression of the protein. Thus, another aspect of the present invention provides for a method for preventing or treating diseases involving overexpression of a CA polypeptide by treatment of a patient with specific antibodies to the CA protein.

[0165] Specific antibodies, either polyclonal or monoclonal, to the CA proteins can be produced by any suitable method known in the art as discussed above. For example, murine or human monoclonal antibodies can be produced by hybridoma technology or, alternatively, the CA proteins, or an immunologically active fragment thereof, or an anti-idiotypic antibody, or fragment thereof can be administered to an animal to elicit the production of antibodies capable of recognizing and binding to the CA proteins. Such antibodies can be from any class of antibodies including, but not limited to IgG, IgA, IgM, IgD, and IgE or in the case of avian species, IgY and from any subclass of antibodies.

[0166] By immunotherapy is meant treatment of a cancer with an antibody raised against a CA protein. As used herein, immunotherapy can be passive or active. Passive immunotherapy as defined herein is the passive transfer of antibody to a recipient (patient). Active immunization is the induction of antibody and/or T-cell responses in a recipient (patient). Induction of an immune response is the result of providing the recipient with an antigen to which antibodies are raised. As appreciated by one of ordinary skill in the art, the antigen may be provided by injecting a polypeptide against which antibodies are desired to be raised into a recipient, or contacting the recipient with a nucleic acid capable of expressing the antigen and under conditions for expression of the antigen.

[0167] In a preferred embodiment, oncogenes which encode secreted growth factors may be inhibited by raising antibodies against CA proteins that are secreted proteins as described above. Without being bound by theory, antibodies used for treatment, bind and prevent the secreted protein from binding to its receptor, thereby inactivating the secreted CA protein.

[0168] In another preferred embodiment, the CA protein to which antibodies are raised is a transmembrane protein. Without being bound by theory, antibodies used for treatment, bind the extracellular domain of the CA protein and prevent it from binding to other proteins, such as circulating ligands or cell-associated molecules. The antibody may cause down-regulation of the transmembrane CA protein. As will be appreciated by one of ordinary skill in the art, the antibody may be a competitive, non-competitive or uncompetitive inhibitor of protein binding to the extracellular domain of the CA protein. The antibody is also an antagonist of the CA protein. Further, the antibody prevents activation of the transmembrane CA protein. In one aspect, when the antibody prevents the binding of other molecules to the CA protein, the antibody prevents growth of the cell. The antibody may also sensitize the cell to cytotoxic agents, including, but not limited to TNF-α; TNF-β, IL-1, INF-γ and IL-2, or chemotherapeutic agents including 5FU, vinblastine, actinomycin D, cisplatin, methotrexate, and the like. In some instances the antibody belongs to a sub-type that activates serum complement when complexed with the transmembrane protein thereby mediating cytotoxicity. Thus, cancers may be treated by administering to a patient antibodies directed against the transmembrane CA protein.

[0169] In another preferred embodiment, the antibody is conjugated to a therapeutic moiety. In one aspect the therapeutic moiety is a small molecule that modulates the activity of the CA protein. In another aspect the therapeutic moiety modulates the activity of molecules associated with or in close proximity to the CA protein. The therapeutic moiety may inhibit enzymatic activity such as protease or protein kinase activity associated with cancer.

[0170] In a preferred embodiment, the therapeutic moiety may also be a cytotoxic agent. In this method, radioisotopes, natural toxins, chemotherapy agents, or other substances (such as biological response modifiers) are chemically linked or conjugated to a monoclonal antibody to form “immunoconjugates” and “immunotoxins” which target the cytotoxic agent to tumor tissue or cells resulting in a reduction in the number of afflicted cells, thereby reducing symptoms associated with cancers, including lymphoma. Cytotoxic agents are numerous and varied and include, but are not limited to, cytotoxic drugs or toxins or active fragments of such toxins. Suitable toxins and their corresponding fragments include diphtheria A chain, exotoxin A chain, ricin A chain, abrin A chain, curcin, crotin, phenomycin, enomycin and the like. Cytotoxic agents also include radiochemicals made by conjugating radioisotopes to antibodies raised against CA proteins, or binding of a radionuclide to a chelating agent that has been covalently attached to the antibody. Targeting the therapeutic moiety to transmembrane CA proteins not only serves to increase the local concentration of therapeutic moiety in the cancer of interest, i.e., lymphoma, but also serves to reduce deleterious side effects that may be associated with the therapeutic moiety. A number of investigators have used monoclonal antibodies as carriers of cytotoxic substances in attempts to selectively direct those agents to malignant tissue. More particularly, a number of monoclonal antibodies have been conjugated to toxins such as ricin, abrin, diphtheria toxin and Pseudomonas exotoxin or to enzymatically active portions (A chains) thereof via heterobifunctional agents. See, e.g., U.S. Pat. No. 4,753,894 to Frankel et al.; Nevelle, et al. (1982) Immunol Rev 62:75-91; Ross et al. (1980) Eur. J. Biochem 104; Vitteta et al. (1982) Immunol Rev 62:158-183; Raso et al. (1982) Cancer Res 42:457-464, and Trowbridge et al. (1981) Nature 294:171-173.

[0171] In another preferred embodiment, the CA protein against which the antibodies are raised is an intracellular protein. In this case, the antibody may be conjugated to a protein that facilitates entry into the cell. In one case, the antibody enters the cell by endocytosis. In another embodiment, a nucleic acid encoding the antibody is administered to the individual or cell. Moreover, wherein the CA protein can be targeted within a cell, e.g., the nucleus, an antibody thereto contains a signal for that target localization, e.g., a nuclear localization signal.

[0172] The CA antibodies of the invention specifically bind to CA proteins. By “specifically bind” herein is meant that the antibodies bind to the protein with a binding constant in the range of 10⁻⁴-10⁻⁶ M⁻¹, with a preferred range being 10⁻⁷-10⁻⁹ M⁻¹.

[0173] In a preferred embodiment, the CA protein is purified or isolated after expression. CA proteins may be isolated or purified in a variety of ways known to those skilled in the art depending on what other components are present in the sample. Standard purification methods include electrophoretic, molecular, immunological and chromatographic techniques, including ion exchange, hydrophobic, affinity, and reverse-phase HPLC chromatography, and chromatofocusing. For example, the CA protein may be purified using a standard anti-CA antibody column. Ultrafiltration and diafiltration techniques, in conjunction with protein concentration, are also useful. For general guidance in suitable purification techniques, see Scopes, R., Protein Purification, Springer-Verlag, NY (1982). The degree of purification necessary will vary depending on the use of the CA protein. In some instances no purification will be necessary.

Detection of Cancer Phenotype

[0174] Once expressed and purified if necessary, the CA proteins and nucleic acids are useful in a number of applications. In one aspect, the expression levels of genes are determined for different cellular states in the cancer phenotype; that is, the expression levels of genes in normal tissue and in cancer tissue (and in some cases, for varying severities of lymphoma that relate to prognosis, as outlined below) are evaluated to provide expression profiles. An expression profile of a particular cell state or point of development is essentially a “fingerprint” of the state; while two states may have any particular gene similarly expressed, the evaluation of a number of genes simultaneously allows the generation of a gene expression profile that is unique to the state of the cell. By comparing expression profiles of cells in different states, information regarding which genes are important (including both up- and down-regulation of genes) in each of these states is obtained. Then, diagnosis may be done or confirmed: does tissue from a particular patient have the gene expression profile of normal or cancer tissue.

[0175] “Differential expression,” or equivalents used herein, refers to both qualitative as well as quantitative differences in the temporal and/or cellular expression patterns of genes, within and among the cells. Thus, a differentially expressed gene can qualitatively have its expression altered, including an activation or inactivation, in, for example, normal versus cancer tissue. That is, genes may be turned on or turned off in a particular state, relative to another state. As is apparent to the skilled artisan, any comparison of two or more states can be made. Such a qualitatively regulated gene will exhibit an expression pattern within a state or cell type which is detectable by standard techniques in one such state or cell type, but is not detectable in both. Alternatively, the determination is quantitative in that expression is increased or decreased; that is, the expression of the gene is either up-regulated, resulting in an increased amount of transcript, or down-regulated, resulting in a decreased amount of transcript. The degree to which expression differs need only be large enough to quantify via standard characterization techniques as outlined below, such as by use of Affymetrix GeneChip® expression arrays, Lockhart, Nature Biotechnology, 14:1675-1680 (1996), hereby expressly incorporated by reference. Other techniques include, but are not limited to, quantitative reverse transcriptase PCR, Northern analysis and RNase protection. As outlined above, preferably the change in expression (i.e. upregulation or downregulation) is at least about 50%, more preferably at least about 100%, more preferably at least about 150%, more preferably, at least about 200%, with from 300 to at least 1000% being especially preferred.

[0176] As will be appreciated by those in the art, this may be done by evaluation at either the gene transcript, or the protein level; that is, the amount of gene expression may be monitored using nucleic acid probes to the DNA or RNA equivalent of the gene transcript, and the quantification of gene expression levels, or, alternatively, the final gene product itself (protein) can be monitored, for example through the use of antibodies to the CA protein and standard immunoassays (ELISAs, etc.) or other techniques, including mass spectroscopy assays, 2D gel electrophoresis assays, etc. Thus, the proteins corresponding to CA genes, i.e. those identified as being important in a particular cancer phenotype, i.e., lymphoma, can be evaluated in a diagnostic test specific for that cancer.

[0177] In a preferred embodiment, gene expression monitoring is done and a number of genes, i.e. an expression profile, is monitored simultaneously, although multiple protein expression monitoring can be done as well. Similarly, these assays may be done on an individual basis as well.

[0178] In this embodiment, the CA nucleic acid probes may be attached to biochips as outlined herein for the detection and quantification of CA sequences in a particular cell. The assays are done as is known in the art. As will be appreciated by those in the art, any number of different CA sequences may be used as probes, with single sequence assays being used in some cases, and a plurality of the sequences described herein being used in other embodiments. In addition, while solid-phase assays are described, any number of solution based assays may be done as well.

[0179] In a preferred embodiment, both solid and solution based assays may be used to detect CA sequences that are up-regulated or down-regulated in cancers as compared to normal tissue. In instances where the CA sequence has been altered but shows the same expression profile or an altered expression profile, the protein will be detected as outlined herein.

[0180] In a preferred embodiment nucleic acids encoding the CA protein are detected. Although DNA or RNA encoding the CA protein may be detected, of particular interest are methods wherein the mRNA encoding a CA protein is detected. The presence of mRNA in a sample is an indication that the CA gene has been transcribed to form the mRNA, and suggests that the protein is expressed. Probes to detect the mRNA can be any nucleotide/deoxynucleotide probe that is complementary to and base pairs with the mRNA and includes but is not limited to oligonucleotides, cDNA or RNA. Probes also should contain a detectable label, as defined herein. In one method the mRNA is detected after immobilizing the nucleic acid to be examined on a solid support such as nylon membranes and hybridizing the probe with the sample. Following washing to remove the non-specifically bound probe, the label is detected. In another method detection of the mRNA is performed in situ. In this method permeabilized cells or tissue samples are contacted with a detectably labeled nucleic acid probe for sufficient time to allow the probe to hybridize with the target mRNA. Following washing to remove the non-specifically bound probe, the label is detected. For example a digoxygenin labeled riboprobe (RNA probe) that is complementary to the mRNA encoding a CA protein is detected by binding the digoxygenin with an anti-digoxygenin secondary antibody and developed with nitro blue tetrazolium and 5-bromo-4-chloro-3-indoyl phosphate.

[0181] In a preferred embodiment, any of the three classes of proteins as described herein (secreted, transmembrane or intracellular proteins) are used in diagnostic assays. The CA proteins, antibodies, nucleic acids, modified proteins and cells containing CA sequences are used in diagnostic assays. This can be done on an individual gene or corresponding polypeptide level, or as sets of assays.

[0182] As described and defined herein, CA proteins find use as markers of cancers, including lymphomas such as, but not limited to, Hodgkin's and non-Hodgkin's lymphoma. Detection of these proteins in putative cancer tissue or patients allows for a determination or diagnosis of the type of cancer. Numerous methods known to those of ordinary skill in the art find use in detecting cancers. In one embodiment, antibodies are used to detect CA proteins. A preferred method separates proteins from a sample or patient by electrophoresis on a gel (typically a denaturing and reducing protein gel, but may be any other type of gel including isoelectric focusing gels and the like). Following separation of proteins, the CA protein is detected by immunoblotting with antibodies raised against the CA protein. Methods of immunoblotting are well known to those of ordinary skill in the art.

[0183] In another preferred method, antibodies to the CA protein find use in in situ imaging techniques. In this method cells are contacted with from one to many antibodies to the CA protein(s). Following washing to remove non-specific antibody binding, the presence of the antibody or antibodies is detected. In one embodiment the antibody is detected by incubating with a secondary antibody that contains a detectable label. In another method the primary antibody to the CA protein(s) contains a detectable label. In another preferred embodiment each one of multiple primary antibodies contains a distinct and detectable label. This method finds particular use in simultaneous screening for a plurality of CA proteins. As will be appreciated by one of ordinary skill in the art, numerous other histological imaging techniques are useful in the invention.

[0184] In a preferred embodiment the label is detected in a fluorometer that has the ability to detect and distinguish emissions of different wavelengths. In addition, a fluorescence activated cell sorter (FACS) can be used in the method.

[0185] In another preferred embodiment, antibodies find use in diagnosing cancers from blood samples. As previously described, certain CA proteins are secreted/circulating molecules. Blood samples, therefore, are useful as samples to be probed or tested for the presence of secreted CA proteins. Antibodies can be used to detect the CA proteins by any of the previously described immunoassay techniques including ELISA, immunoblotting (Western blotting), immunoprecipitation, BIACORE technology and the like, as will be appreciated by one of ordinary skill in the art.

[0186] In a preferred embodiment, in situ hybridization of labeled CA nucleic acid probes to tissue arrays is done. For example, arrays of tissue samples, including CA tissue and/or normal tissue, are made. In situ hybridization as is known in the art can then be done.

[0187] It is understood that when comparing the expression fingerprints between an individual and a standard, the skilled artisan can make a diagnosis as well as a prognosis. It is further understood that the genes that indicate diagnosis may differ from those that indicate prognosis.

[0188] In a preferred embodiment, the CA proteins, antibodies, nucleic acids, modified proteins and cells containing CA sequences are used in prognosis assays. As above, gene expression profiles can be generated that correlate to cancer, especially lymphoma, severity, in terms of long term prognosis. Again, this may be done on either a protein or gene level, with the use of genes being preferred. As above, the CA probes are attached to biochips for the detection and quantification of CA sequences in a tissue or patient. The assays proceed as outlined for diagnosis.

Screening for CA-Targeted Drugs

[0189] In one embodiment, any of the CA sequences as described herein are used in drug screening assays. The CA proteins, antibodies, nucleic acids, modified proteins and cells containing CA sequences are used in drug screening assays or by evaluating the effect of drug candidates on a “gene expression profile” or expression profile of polypeptides. In one embodiment, the expression profiles are used, preferably in conjunction with high throughput screening techniques to allow monitoring for expression profile genes after treatment with a candidate agent, Zlokarnik, et al., Science 279, 84-8 (1998), Heid, et al., Genome Res., 6:986-994 (1996).

[0190] In another embodiment, the CA proteins, antibodies, nucleic acids, modified proteins and cells containing the native or modified CA proteins are used in screening assays. That is, the present invention provides novel methods for screening for compositions that modulate the cancer phenotype. As above, this can be done by screening for modulators of gene expression or for modulators of protein activity. Similarly, this may be done on an individual gene or protein level or by evaluating the effect of drug candidates on a “gene expression profile”. In a preferred embodiment, the expression profiles are used, preferably in conjunction with high throughput screening techniques to allow monitoring for expression profile genes after treatment with a candidate agent, see Zlokarnik, supra.

[0191] Having identified the CA genes herein, a variety of assays to evaluate the effects of agents on gene expression may be executed. In a preferred embodiment, assays may be run on an individual gene or protein level. That is, having identified a particular gene as aberrantly regulated in cancer, candidate bioactive agents may be screened to modulate the gene's regulation. “Modulation” thus includes both an increase and a decrease in gene expression or activity. The preferred amount of modulation will depend on the original change of the gene expression in normal versus tumor tissue, with changes of at least 10%, preferably 50%, more preferably 100-300%, and in some embodiments 300-1000% or greater. Thus, if a gene exhibits a 4 fold increase in tumor compared to normal tissue, a decrease of about four fold is desired; a 10 fold decrease in tumor compared to normal tissue gives a 10 fold increase in expression for a candidate agent is desired, etc. Alternatively, where the CA sequence has been altered but shows the same expression profile or an altered expression profile, the protein will be detected as outlined herein.

[0192] As will be appreciated by those in the art, this may be done by evaluation at either the gene or the protein level; that is, the amount of gene expression may be monitored using nucleic acid probes and the quantification of gene expression levels, or, alternatively, the level of the gene product itself can be monitored, for example through the use of antibodies to the CA protein and standard immunoassays. Alternatively, binding and bioactivity assays with the protein may be done as outlined below.

[0193] In a preferred embodiment, gene expression monitoring is done and a number of genes, i.e. an expression profile, is monitored simultaneously, although multiple protein expression monitoring can be done as well.

[0194] In this embodiment, the CA nucleic acid probes are attached to biochips as outlined herein for the detection and quantification of CA sequences in a particular cell. The assays are further described below.

[0195] Generally, in a preferred embodiment, a candidate bioactive agent is added to the cells prior to analysis. Moreover, screens are provided to identify a candidate bioactive agent that modulates a particular type of cancer, modulates CA proteins, binds to a CA protein, or interferes between the binding of a CA protein and an antibody.

[0196] The term “candidate bioactive agent” or “drug candidate” or grammatical equivalents as used herein describes any molecule, e.g., protein, oligopeptide, small organic or inorganic molecule, polysaccharide, polynucleotide, etc., to be tested for bioactive agents that are capable of directly or indirectly altering either the cancer phenotype, binding to and/or modulating the bioactivity of a CA protein, or the expression of a CA sequence, including both nucleic acid sequences and protein sequences. In a particularly preferred embodiment, the candidate agent suppresses a CA phenotype, for example to a normal tissue fingerprint. Similarly, the candidate agent preferably suppresses a severe CA phenotype. Generally a plurality of assay mixtures are run in parallel with different agent concentrations to obtain a differential response to the various concentrations. Typically, one of these concentrations serves as a negative control, i.e., at zero concentration or below the level of detection.

[0197] In one aspect, a candidate agent will neutralize the effect of a CA protein. By “neutralize” is meant that activity of a protein is either inhibited or counter acted against so as to have substantially no effect on a cell.

[0198] Candidate agents encompass numerous chemical classes, though typically they are organic or inorganic molecules, preferably small organic compounds having a molecular weight of more than 100 and less than about 2,500 Daltons. Preferred small molecules are less than 2000, or less than 1500 or less than 1000 or less than 500 D. Candidate agents comprise functional groups necessary for structural interaction with proteins, particularly hydrogen bonding, and typically include at least an amine, carbonyl, hydroxyl or carboxyl group, preferably at least two of the functional chemical groups. The candidate agents often comprise cyclical carbon or heterocyclic structures and/or aromatic or polyaromatic structures substituted with one or more of the above functional groups. Candidate agents are also found among biomolecules including peptides, saccharides, fatty acids, steroids, purines, pyrimidines, derivatives, structural analogs or combinations thereof. Particularly preferred are peptides.

[0199] Candidate agents are obtained from a wide variety of sources including libraries of synthetic or natural compounds. For example, numerous means are available for random and directed synthesis of a wide variety of organic compounds and biomolecules, including expression of randomized oligonucleotides. Alternatively, libraries of natural compounds in the form of bacterial, fungal, plant and animal extracts are available or readily produced. Additionally, natural or synthetically produced libraries and compounds are readily modified through conventional chemical, physical and biochemical means. Known pharmacological agents may be subjected to directed or random chemical modifications, such as acylation, alkylation, esterification, or amidification to produce structural analogs.

[0200] In one embodiment, the candidate bioactive agents are proteins. By “protein” herein is meant at least two covalently attached amino acids, which includes proteins, polypeptides, oligopeptides and peptides. The protein may be made up of naturally occurring amino acids and peptide bonds, or synthetic peptidomimetic structures. Thus “amino acid”, or “peptide residue”, as used herein means both naturally occurring and synthetic amino acids. For example, homo-phenylalanine, citrulline and norleucine are considered amino acids for the purposes of the invention. “Amino acid” also includes imino acid residues such as proline and hydroxyproline. The side chains may be in either the (R) or the (S) configuration. In the preferred embodiment, the amino acids are in the (S) or L-configuration. If non-naturally occurring side chains are used, non-amino acid substituents may be used, for example to prevent or retard in vivo degradations.

[0201] In a preferred embodiment, the candidate bioactive agents are naturally occurring proteins or fragments of naturally occurring proteins. Thus, for example, cellular extracts containing proteins, or random or directed digests of proteinaceous cellular extracts, may be used. In this way libraries of prokaryotic and eukaryotic proteins may be made for screening in the methods of the invention. Particularly preferred in this embodiment are libraries of bacterial, fungal, viral, and mammalian proteins, with the latter being preferred, and human proteins being especially preferred.

[0202] In another preferred embodiment, the candidate bioactive agents are peptides of from about 5 to about 30 amino acids, with from about 5 to about 20 amino acids being preferred, and from about 7 to about 15 being particularly preferred. The peptides may be digests of naturally occurring proteins as is outlined above, random peptides, or “biased” random peptides. By “randomized” or grammatical equivalents herein is meant that each nucleic acid and peptide consists of essentially random nucleotides and amino acids, respectively. Since generally these random peptides (or nucleic acids, discussed below) are chemically synthesized, they may incorporate any nucleotide or amino acid at any position. The synthetic process can be designed to generate randomized proteins or nucleic acids, to allow the formation of all or most of the possible combinations over the length of the sequence, thus forming a library of randomized candidate bioactive proteinaceous agents.

[0203] In one embodiment, the library is fully randomized, with no sequence preferences or constants at any position. In a preferred embodiment, the library is biased. That is, some positions within the sequence are either held constant, or are selected from a limited number of possibilities. For example, in a preferred embodiment, the nucleotides or amino acid residues are randomized within a defined class, for example, of hydrophobic amino acids, hydrophilic residues, sterically biased (either small or large) residues, towards the creation of nucleic acid binding domains, the creation of cysteines, for cross-linking, prolines for SH-3 domains, serines, threonines, tyrosines or histidines for phosphorylation sites, etc., or to purines, etc.

[0204] In one embodiment, the candidate bioactive agents are nucleic acids. As described generally for proteins, nucleic acid candidate bioactive agents may be naturally occurring nucleic acids, random nucleic acids, or “biased” random nucleic acids. In another embodiment, the candidate bioactive agents are organic chemical moieties, a wide variety of which are available in the literature.

[0205] In assays for testing alteration of the expression profile of one or more CA genes, after the candidate agent has been added and the cells allowed to incubate for some period of time, a nucleic acid sample containing the target sequences to be analyzed is prepared. The target sequence is prepared using known techniques (e.g., converted from RNA to labeled cDNA, as described above) and added to a suitable microarray. For example, an in vitro reverse transcription with labels covalently attached to the nucleosides is performed. Generally, the nucleic acids are labeled with a label as defined herein, especially with biotin-FITC or PE, Cy3 and Cy5.

[0206] As will be appreciated by those in the art, these assays can be direct hybridization assays or can comprise “sandwich assays”, which include the use of multiple probes, as is generally outlined in U.S. Pat. Nos. 5,681,702, 5,597,909, 5,545,730, 5,594,117, 5,591,584, 5,571,670, 5,580,731, 5,571,670, 5,591,584, 5,624,802, 5,635,352, 5,594,118, 5,359,100, 5,124,246 and 5,681,697, all of which are hereby incorporated by reference. In this embodiment, in general, the target nucleic acid is prepared as outlined above, and then added to the biochip comprising a plurality of nucleic acid probes, under conditions that allow the formation of a hybridization complex.

[0207] A variety of hybridization conditions may be used in the present invention, including high, moderate and low stringency conditions as outlined above. The assays are generally run under stringency conditions that allow formation of the label probe hybridization complex only in the presence of target. Stringency can be controlled by altering a step parameter that is a thermodynamic variable, including, but not limited to, temperature, formamide concentration, salt concentration, chaotropic salt concentration, pH, organic solvent concentration, etc. These parameters may also be used to control non-specific binding, as is generally outlined in U.S. Pat. No. 5,681,697. Thus it may be desirable to perform certain steps at higher stringency conditions to reduce non-specific binding.

[0208] The reactions outlined herein may be accomplished in a variety of ways, as will be appreciated by those in the art. Components of the reaction may be added simultaneously, or sequentially, in any order, with preferred embodiments outlined below. In addition, the reaction may include a variety of other reagents in the assays. These include reagents like salts, buffers, neutral proteins, e.g. albumin, detergents, etc which may be used to facilitate optimal hybridization and detection, and/or reduce non-specific or background interactions. Also reagents that otherwise improve the efficiency of the assay, such as protease inhibitors, nuclease inhibitors, anti-microbial agents, etc., may be used, depending on the sample preparation methods and purity of the target. In addition, either solid phase or solution based (i.e., kinetic PCR) assays may be used.

[0209] Once the assay is run, the data are analyzed to determine the expression levels, and changes in expression levels as between states, of individual genes, forming a gene expression profile.

[0210] In a preferred embodiment, as for the diagnosis and prognosis applications, having identified the differentially expressed gene(s) or mutated gene(s) important in any one state, screens can be run to test for alteration of the expression of the CA genes individually. That is, screening for modulation of regulation of expression of a single gene can be done. Thus, for example, in the case of target genes whose presence or absence is unique between two states, screening is done for modulators of the target gene expression.

[0211] In addition, screens can be done for novel genes that are induced in response to a candidate agent. After identifying a candidate agent based upon its ability to suppress a CA expression pattern leading to a normal expression pattern, or modulate a single CA gene expression profile so as to mimic the expression of the gene from normal tissue, a screen as described above can be performed to identify genes that are specifically modulated in response to the agent. Comparing expression profiles between normal tissue and agent treated CA tissue reveals genes that are not expressed in normal tissue or CA tissue, but are expressed in agent treated tissue. These agent specific sequences can be identified and used by any of the methods described herein for CA genes or proteins. In particular these sequences and the proteins they encode find use in marking or identifying agent-treated cells. In addition, antibodies can be raised against the agent-induced proteins and used to target novel therapeutics to the treated CA tissue sample.

[0212] Thus, in one embodiment, a candidate agent is administered to a population of CA cells, that thus has an associated CA expression profile. By “administration” or “contacting” herein is meant that the candidate agent is added to the cells in such a manner as to allow the agent to act upon the cell, whether by uptake and intracellular action, or by action at the cell surface. In some embodiments, nucleic acid encoding a proteinaceous candidate agent (i.e. a peptide) may be put into a viral construct such as a retroviral construct and added to the cell, such that expression of the peptide agent is accomplished; see PCT US97/01019, hereby expressly incorporated by reference.

[0213] Once the candidate agent has been administered to the cells, the cells can be washed if desired and are allowed to incubate under preferably physiological conditions for some period of time. The cells are then harvested and a new gene expression profile is generated, as outlined herein.

[0214] Thus, for example, CA tissue may be screened for agents that reduce or suppress the CA phenotype. A change in at least one gene of the expression profile indicates that the agent has an effect on CA activity. By defining such a signature for the CA phenotype, screens for new drugs that alter the phenotype can be devised. With this approach, the drug target need not be known and need not be represented in the original expression screening platform, nor does the level of transcript for the target protein need to change.

[0215] In a preferred embodiment, as outlined above, screens may be done on individual genes and gene products (proteins). That is, having identified a particular differentially expressed gene as important in a particular state, screening of modulators of either the expression of the gene or the gene product itself can be done. The gene products of differentially expressed genes are sometimes referred to herein as “CA proteins” or “CAP”. The CAP may be a fragment, or alternatively, be the full-length protein to the fragment encoded by the nucleic acids of Tables 1-124 (human genomic sequences of SEQ ID NOS: 4, 10, 16, 26, 32, 46, 60, 70, 80, 96, 114, 137, 153, 173, 187, 209, 223, 229, 235, 243, 255, 261, 267, 281, 293, 303, 311, 321, 341, 359, 367, 375, 383, 397, 407, 413, 427, 449, 455, 463, 473, 481, 491, 499, 507, 515, 521, 527, 541, 547, 555, 563, 643, 651, 659, 669, 681, 715, 723, 743, 749, 759, 775, 787, 793, 805, 811, 817, 823, 833, 839, 851, 861, 871, 879, 899, 909, 917, 930, 938, 950, 966, 976, 990, 1002, 1016, 1024, 1040, 1046, 1054, 1068, 1082, 1088, 1102, 1112, 1122, 1130, 1140, 1151, 1165, 1175, 1185, 1193, 1205, 1211, 1235, 1241, 1255, 1267, 1277, 1295, 1301, 1313, 1349, 1357, 1369, 1377, 1383, 1391, 1403, 1411, 1419, 1425, 1431, and 1439, and sequences of SEQ ID NOS: 5, 11, 17, 19, 21, 27, 33, 47, 49, 51, 53, 55, 61, 63, 65, 71, 81, 83, 85, 87, 89, 97, 99, 101, 103, 105, 107, 109, 115, 117, 119, 121, 123, 125, 127, 129, 138, 140, 142, 144, 146, 148, 154, 156, 158, 160, 162, 164, 166, 168, 174, 176, 178, 180, 188, 190, 192, 194, 196, 198, 200, 202, 204, 210, 212, 214, 216, 218, 224, 230, 236, 238, 244, 246, 248, 250, 256, 262, 268, 270, 272, 274, 276, 282, 284, 286, 288, 294, 296, 298, 304, 306, 312, 314, 316, 322, 324, 326, 328, 330, 332, 342, 344, 346, 348, 350, 352, 354, 360, 368, 370, 376, 384, 386, 388, 390, 392, 398, 400, 402, 408, 414, 416, 418, 420, 428, 430, 432, 434, 436, 438, 440, 442, 444, 450, 456, 458, 464, 466, 468, 474, 476, 482, 484, 486, 492, 494, 500, 508, 510, 516, 522, 528, 530, 532, 534, 536, 542, 548, 550, 556, 558, 564, 566, 568, 570, 572, 574, 576, 578, 580, 582, 584, 586, 588, 590, 592, 594, 596, 598, 600, 602, 604, 606, 608, 610, 612, 614, 616, 618, 620, 622, 624, 626, 628, 630, 632, 634, 644, 646, 652, 654, 660, 662, 664, 670, 672, 674, 676, 682, 684, 686, 688, 690, 692, 694, 696, 698, 700, 702, 704, 706, 708, 710, 716, 718, 724, 726, 728, 730, 732, 734, 736, 744, 750, 752, 754, 760, 776, 778, 780, 782, 788, 794, 796, 798, 800, 806, 812, 818, 824, 826, 828, 834, 840, 842, 844, 846, 852, 854, 856, 862, 864, 866, 872, 874, 880, 882, 884, 886, 888, 890, 892, 894, 900, 902, 910, 912, 918, 920, 922, 931, 933, 939, 941, 943, 945, 951, 953, 955, 957, 959, 961, 967, 969, 977, 979, 981, 983, 985, 991, 993, 995, 997, 1003, 1005, 1017, 1025, 1027, 1029, 1031, 1033, 1035, 1041, 1047, 1049, 1055, 1057, 1059, 1061, 1063, 1069, 1071, 1073, 1075, 1077, 1083, 1089, 1091, 1093, 1103, 1105, 1113, 1115, 1117, 1123, 1125, 1131, 1133, 1135, 1141, 1143, 1145, 1147, 1149, 1152, 1154, 1156, 1158, 1160, 1166, 1168, 1170, 1176, 1178, 1180, 1186, 1188, 1194, 1196, 1198, 1200, 1206, 1212, 1214, 1216, 1218, 1220, 1222, 1224, 1226, 1228, 1230, 1236, 1242, 1244, 1246, 1248, 1250, 1256, 1258, 1260, 1262, 1268, 1270, 1272, 1278, 1280, 1282, 1284, 1286, 1288, 1290, 1296, 1302, 1304, 1306, 1308, 1314, 1316, 1318, 1320, 1322, 1324, 1326, 1328, 1330, 1332, 1334, 1336, 1338, 1340, 1342, 1350, 1352, 1358, 1360, 1362, 1364, 1370, 1372, 1378, 1384, 1386, 1392, 1394, 1396, 1398, 1404, 1406, 1412, 1414, 1420, 1426, 1432, 1434, and 1440 corresponding to the human mRNAs generated therefrom). In a preferred embodiment, the CAP is selected from the human protein sequences shown in Tables 1-124 (of SEQ ID NOS: 6, 12, 18, 20, 22, 28, 34, 48, 50, 52, 54, 56, 62, 64, 66, 72, 82, 84, 86,88,90,98, 100, 102, 104, 106, 108, 110, 116, 118, 120, 122, 124, 126, 128, 130, 139, 141, 143, 145, 147, 149, 155, 157, 159, 161, 163, 165, 167, 169, 175, 177, 179, 181, 189, 191, 193, 195, 197, 199, 201, 203, 205, 211, 213, 215, 217, 219, 225, 231, 237, 239, 245, 247, 249, 251, 257, 263, 269, 271, 273, 275, 277, 283, 285, 287, 289, 295, 297, 299, 305, 307, 313, 315, 317, 323, 325, 327, 329, 331, 333, 343, 345, 347, 349, 351, 353, 355, 361, 369, 371, 377, 385, 387, 389, 391, 393, 399, 401, 403, 409, 415, 417, 419, 421, 429, 431, 433, 435, 437, 439, 441, 443, 445, 451, 457, 459, 465, 467, 469, 475, 477, 483, 485, 487, 493, 495, 501, 509, 511, 517, 523, 529, 531, 533, 535, 537, 543, 549, 551, 557, 559, 565, 567, 569, 571, 573, 575, 577, 579, 581, 583, 585, 587, 589, 591, 593, 595, 597, 599, 601, 603, 605, 607, 609, 611, 613, 615, 617, 619, 621, 623, 625, 627, 629, 631, 633, 635, 645, 647, 653, 655, 661, 663, 665, 671, 673, 675, 677, 683, 685, 687, 689, 691, 693, 695, 697, 699, 701, 703, 705, 707, 709, 711, 717, 719, 725, 727, 729, 731, 733, 735, 737, 745, 751, 753, 755, 761, 777, 779, 781, 783, 789, 795, 797, 799, 801, 807, 813, 819, 825, 827, 829, 835, 841, 843, 845, 847, 853, 855, 857, 863, 865, 867, 873, 875, 881, 883, 885, 887, 889, 891, 893, 895, 901, 903, 911, 913, 919, 921, 923, 932, 934, 940, 942, 944, 946, 952, 954, 956, 958, 960, 962, 968, 970, 978, 980, 982, 984, 986, 992, 994, 996, 998, 1004, 1006, 1018, 1026, 1028, 1030, 1032, 1034, 1036, 1042, 1048, 1050, 1056, 1058, 1060, 1062, 1064, 1070, 1072, 1074, 1076, 1078, 1084, 1090, 1092, 1094, 1104, 1106, 1114, 1116, 1118, 1124, 1126, 1132, 1134, 1136, 1142, 1144, 1146, 1148, 1150, 1153, 1155, 1157, 1159, 1161, 1167, 1169, 1171, 1177, 1179, 1181, 1187, 1189, 1195, 1197, 1199, 1201, 1207, 1213, 1215, 1217, 1219, 1221, 1223, 1225, 1227, 1229, 1231, 1237, 1243, 1245, 1247, 1249, 1251, 1257, 1259, 1261, 1263, 1269, 1271, 1273, 1279, 1281, 1283, 1285, 1287, 1289, 1291, 1297, 1303, 1305, 1307, 1309, 1315, 1317, 1319, 1321, 1323, 1325, 1327, 1329, 1331, 1333, 1335, 1337, 1339, 1341, 1343, 1351, 1353, 1359, 1361, 1363, 1365, 1371, 1373, 1379, 1385, 1387, 1393, 1395, 1397, 1399, 1405, 1407, 1413, 1415, 1421, 1427, 1433, 1435, and 1441). In another embodiment, the sequences are sequence variants as further described herein.

[0216] Preferably, the CAP is a fragment approximately 14 to 24 amino acids in length. More preferably the fragment is a soluble fragment. Preferably, the fragment includes a non-transmembrane region. In a preferred embodiment, the fragment has an N-terminal Cys to aid in solubility. In one embodiment, the C-terminus of the fragment is kept as a free acid and the N-terminus is a free amine to aid in coupling, e.g., to a cysteine.

[0217] In one embodiment the CA proteins are conjugated to an immunogenic agent as discussed herein. In one embodiment the CA protein is conjugated to BSA.

[0218] In a preferred embodiment, screening is done to alter the biological function of the expression product of the CA gene. Again, having identified the importance of a gene in a particular state, screening for agents that bind and/or modulate the biological activity of the gene product can be run as is more fully outlined below.

[0219] In a preferred embodiment, screens are designed to first find candidate agents that can bind to CA proteins, and then these agents may be used in assays that evaluate the ability of the candidate agent to modulate the CAP activity and the cancer phenotype. Thus, as will be appreciated by those in the art, there are a number of different assays that may be run; binding assays and activity assays.

[0220] In a preferred embodiment, binding assays are done. In general, purified or isolated gene product is used; that is, the gene products of one or more CA nucleic acids are made. In general, this is done as is known in the art. For example, antibodies are generated to the protein gene products, and standard immunoassays are run to determine the amount of protein present. Alternatively, cells comprising the CA proteins can be used in the assays.

[0221] Thus, in a preferred embodiment, the methods comprise combining a CA protein and a candidate bioactive agent, and determining the binding of the candidate agent to the CA protein. Preferred embodiments utilize the human or mouse CA protein, although other mammalian proteins may also be used, for example for the development of animal models of human disease. In some embodiments, as outlined herein, variant or derivative CA proteins may be used.

[0222] Generally, in a preferred embodiment of the methods herein, the CA protein or the candidate agent is non-diffusably bound to an insoluble support having isolated sample receiving areas (e.g. a microtiter plate, an array, etc.). The insoluble support may be made of any composition to which the compositions can be bound, is readily separated from soluble material, and is otherwise compatible with the overall method of screening. The surface of such supports may be solid or porous and of any convenient shape. Examples of suitable insoluble supports include microtiter plates, arrays, membranes and beads. These are typically made of glass, plastic (e.g., polystyrene), polysaccharides, nylon or nitrocellulose, Teflon®, etc. Microtiter plates and arrays are especially convenient because a large number of assays can be carried out simultaneously, using small amounts of reagents and samples.

[0223] The particular manner of binding of the composition is not crucial so long as it is compatible with the reagents and overall methods of the invention, maintains the activity of the composition and is nondiffusable. Preferred methods of binding include the use of antibodies (which do not sterically block either the ligand binding site or activation sequence when the protein is bound to the support), direct binding to “sticky” or ionic supports, chemical crosslinking, the synthesis of the protein or agent on the surface, etc. Following binding of the protein or agent, excess unbound material is removed by washing. The sample receiving areas may then be blocked through incubation with bovine serum albumin (BSA), casein or other innocuous protein or other moiety.

[0224] In a preferred embodiment, the CA protein is bound to the support, and a candidate bioactive agent is added to the assay. Alternatively, the candidate agent is bound to the support and the CA protein is added. Novel binding agents include specific antibodies, non-natural binding agents identified in screens of chemical libraries, peptide analogs, etc. Of particular interest are screening assays for agents that have a low toxicity for human cells. A wide variety of assays may be used for this purpose, including labeled in vitro protein-protein binding assays, electrophoretic mobility shift assays, immunoassays for protein binding, functional assays (phosphorylation assays, etc.) and the like.

[0225] The determination of the binding of the candidate bioactive agent to the CA protein may be done in a number of ways. In a preferred embodiment, the candidate bioactive agent is labeled, and binding determined directly. For example, this may be done by attaching all or a portion of the CA protein to a solid support, adding a labeled candidate agent (for example a fluorescent label), washing off excess reagent, and determining whether the label is present on the solid support. Various blocking and washing steps may be utilized as is known in the art.

[0226] By “labeled” herein is meant that the compound is either directly or indirectly labeled with a label which provides a detectable signal, e.g. radioisotope, fluorescers, enzyme, antibodies, particles such as magnetic particles, chemiluminescers, or specific binding molecules, etc. Specific binding molecules include pairs, such as biotin and streptavidin, digoxin and antidigoxin etc. For the specific binding members, the complementary member would normally be labeled with a molecule which provides for detection, in accordance with known procedures, as outlined above. The label can directly or indirectly provide a detectable signal.

[0227] In some embodiments, only one of the components is labeled. For example, the proteins (or proteinaceous candidate agents) may be labeled at tyrosine positions using ¹²⁵I, or with fluorophores. Alternatively, more than one component may be labeled with different labels; using ¹²⁵I for the proteins, for example, and a fluorophore for the candidate agents.

[0228] In a preferred embodiment, the binding of the candidate bioactive agent is determined through the use of competitive binding assays. In this embodiment, the competitor is a binding moiety known to bind to the target molecule (i.e. CA protein), such as an antibody, peptide, binding partner, ligand, etc. Under certain circumstances, there may be competitive binding as between the bioactive agent and the binding moiety, with the binding moiety displacing the bioactive agent.

[0229] In one embodiment, the candidate bioactive agent is labeled. Either the candidate bioactive agent, or the competitor, or both, is added first to the protein for a time sufficient to allow binding, if present. Incubations may be performed at any temperature which facilitates optimal activity, typically between 4 and 40° C. Incubation periods are selected for optimum activity, but may also be optimized to facilitate rapid high throughput screening. Typically between 0.1 and 1 hour will be sufficient. Excess reagent is generally removed or washed away. The second component is then added, and the presence or absence of the labeled component is followed, to indicate binding.

[0230] In a preferred embodiment, the competitor is added first, followed by the candidate bioactive agent. Displacement of the competitor is an indication that the candidate bioactive agent is binding to the CA protein and thus is capable of binding to, and potentially modulating, the activity of the CA protein. In this embodiment, either component can be labeled. Thus, for example, if the competitor is labeled, the presence of label in the wash solution indicates displacement by the agent. Alternatively, if the candidate bioactive agent is labeled, the presence of the label on the support indicates displacement.

[0231] In an alternative embodiment, the candidate bioactive agent is added first, with incubation and washing, followed by the competitor. The absence of binding by the competitor may indicate that the bioactive agent is bound to the CA protein with a higher affinity. Thus, if the candidate bioactive agent is labeled, the presence of the label on the support, coupled with a lack of competitor binding, may indicate that the candidate agent is capable of binding to the CA protein.

[0232] In a preferred embodiment, the methods comprise differential screening to identity bioactive agents that are capable of modulating the activity of the CA proteins. In this embodiment, the methods comprise combining a CA protein and a competitor in a first sample. A second sample comprises a candidate bioactive agent, a CA protein and a competitor. The binding of the competitor is determined for both samples, and a change, or difference in binding between the two samples indicates the presence of an agent capable of binding to the CA protein and potentially modulating its activity. That is, if the binding of the competitor is different in the second sample relative to the first sample, the agent is capable of binding to the CA protein.

[0233] Alternatively, a preferred embodiment utilizes differential screening to identify drug candidates that bind to the native CA protein, but cannot bind to modified CA proteins. The structure of the CA protein may be modeled, and used in rational drug design to synthesize agents that interact with that site. Drug candidates that affect CA bioactivity are also identified by screening drugs for the ability to either enhance or reduce the activity of the protein.

[0234] Positive controls and negative controls may be used in the assays. Preferably all control and test samples are performed in at least triplicate to obtain statistically significant results. Incubation of all samples is for a time sufficient for the binding of the agent to the protein. Following incubation, all samples are washed free of non-specifically bound material and the amount of bound, generally labeled agent determined. For example, where a radiolabel is employed, the samples may be counted in a scintillation counter to determine the amount of bound compound.

[0235] A variety of other reagents may be included in the screening assays. These include reagents like salts, neutral proteins, e.g. albumin, detergents, etc which may be used to facilitate optimal protein-protein binding and/or reduce non-specific or background interactions. Also reagents that otherwise improve the efficiency of the assay, such as protease inhibitors, nuclease inhibitors, anti-microbial agents, etc., may be used. The mixture of components may be added in any order that provides for the requisite binding.

[0236] Screening for agents that modulate the activity of CA proteins may also be done. In a preferred embodiment, methods for screening for a bioactive agent capable of modulating the activity of CA proteins comprise the steps of adding a candidate bioactive agent to a sample of CA proteins, as above, and determining an alteration in the biological activity of CA proteins. “Modulating the activity of a CA protein” includes an increase in activity, a decrease in activity, or a change in the type or kind of activity present. Thus, in this embodiment, the candidate agent should both bind to CA proteins (although this may not be necessary), and alter its biological or biochemical activity as defined herein. The methods include both in vitro screening methods, as are generally outlined above, and in vivo screening of cells for alterations in the presence, distribution, activity or amount of CA proteins.

[0237] Thus, in this embodiment, the methods comprise combining a CA sample and a candidate bioactive agent, and evaluating the effect on CA activity. By “CA activity” or grammatical equivalents herein is meant one of the CA protein's biological activities, including, but not limited to, its role in tumorigenesis, including cell division, preferably in lymphatic tissue, cell proliferation, tumor growth and transformation of cells. In one embodiment, CA activity includes activation of or by a protein encoded by a nucleic acid of Tables 1-124. An inhibitor of CA activity is the inhibition of any one or more CA activities.

[0238] In a preferred embodiment, the activity of the CA protein is increased; in another preferred embodiment, the activity of the CA protein is decreased. Thus, bioactive agents that are antagonists are preferred in some embodiments, and bioactive agents that are agonists may be preferred in other embodiments.

[0239] In a preferred embodiment, the invention provides methods for screening for bioactive agents capable of modulating the activity of a CA protein. The methods comprise adding a candidate bioactive agent, as defined above, to a cell comprising CA proteins. Preferred cell types include almost any cell. The cells contain a recombinant nucleic acid that encodes a CA protein. In a preferred embodiment, a library of candidate agents is tested on a plurality of cells.

[0240] In one aspect, the assays are evaluated in the presence or absence or previous or subsequent exposure of physiological signals, for example hormones, antibodies, peptides, antigens, cytokines, growth factors, action potentials, pharmacological agents including chemotherapeutics, radiation, carcinogenics, or other cells (i.e. cell-cell contacts). In another example, the determinations are determined at different stages of the cell cycle process.

[0241] In this way, bioactive agents are identified. Compounds with pharmacological activity are able to enhance or interfere with the activity of the CA protein.

Applications of the Invention

[0242] In one embodiment, a method of inhibiting cancer cell division is provided. In another embodiment, a method of inhibiting tumor growth is provided. In a further embodiment, methods of treating cells or individuals with cancer are provided.

[0243] The method comprises administration of a cancer inhibitor. In particular embodiments, the cancer inhibitor is an antisense molecule, a pharmaceutical composition, a therapeutic agent or small molecule, or a monoclonal, polyclonal, chimeric or humanized antibody. In particular embodiments, a therapeutic agent is coupled with a an antibody, preferable a monoclonal antobody.

[0244] In other embodiments, methods for detection or diagnosis of cancer cells in an individual are provided. In particular embodiments, the diagnostic/detection agent is a small molecule that pereferentially binds to a CAP according to the invention. In one embodiment, the diagnostic/detection agent is an antibody, preferably a monoclonal antobody, preferably linked to a detectable agent.

[0245] In other embodiments of the invention, animal models and transgenic animals are provided, which find use in generating animal models of cancers, particularly lymphomas and carcinomas.

(a) Antisense Molecules

[0246] In one embodiment, the cancer inhibitor is an antisense molecule. Antisense molecules as used herein include antisense or sense oligonucleotides comprising a single-stranded nucleic acid sequence (either RNA or DNA) capable of binding to target mRNA (sense) or DNA (antisense) sequences for cancer molecules. Antisense or sense oligonucleotides, according to the present invention, comprise a fragment generally at least about 14 nucleotides, preferably from about 14 to 30 nucleotides. The ability to derive an antisense or a sense oligonucleotide, based upon a cDNA sequence encoding a given protein is described in, for example, Stein and Cohen, Cancer Res. 48:2659, (1988) and van der Krol et al., BioTechniques 6:958, (1988).

[0247] Antisense molecules can be modified or unmodified RNA, DNA, or mixed polymer oligonucleotides. These molecules function by specifically binding to matching sequences resulting in inhibition of peptide synthesis (Wu-Pong, November 1994, BioPharm, 20-33) either by steric blocking or by activating an RNase H enzyme. Antisense molecules can also alter protein synthesis by interfering with RNA processing or transport from the nucleus into the cytoplasm (Mukhopadhyay & Roth, 1996, Crit. Rev. in Oncogenesis 7, 151-190). In addition, binding of single stranded DNA to RNA can result in nuclease-mediated degradation of the heteroduplex (Wu-Pong, supra). Backbone modified DNA chemistry which have thus far been shown to act as substrates for RNase H are phosphorothioates, phosphorodithioates, borontrifluoridates, and 2′-arabino and 2′-fluoro arabino-containing oligonucleotides.

[0248] Antisense molecules may be introduced into a cell containing the target nucleotide sequence by formation of a conjugate with a ligand binding molecule, as described in WO 91/04753. Suitable ligand binding molecules include, but are not limited to, cell surface receptors, growth factors, other cytokines, or other ligands that bind to cell surface receptors. Preferably, conjugation of the ligand binding molecule does not substantially interfere with the ability of the ligand binding molecule to bind to its corresponding molecule or receptor, or block entry of the sense or antisense oligonucleotide or its conjugated version into the cell. Alternatively, a sense or an antisense oligonucleotide may be introduced into a cell containing the target nucleic acid sequence by formation of an oligonucleotide-lipid complex, as described in WO 90/10448. It is understood that the use of antisense molecules or knock out and knock in models may also be used in screening assays as discussed above, in addition to methods of treatment.

(b) RNA Interference

[0249] RNA interference refers to the process of sequence-specific post transcriptional gene silencing in animals mediated by short interfering RNAs (siRNA) (Fire et al., Nature, 391, 806 (1998)). The corresponding process in plants is referred to as post transcriptional gene silencing or RNA silencing and is also referred to as quelling in fungi. The presence of dsRNA in cells triggers the RNAi response though a mechanism that has yet to be fully characterized. This mechanism appears to be different from the interferon response that results from dsRNA mediated activation of protein kinase PKR and 2′,5′-oligoadenylate synthetase resulting in non-specific cleavage of mRNA by ribonuclease L. (reviewed in Sharp, P. A., RNA interference-2001, Genes & Development 15:485-490 (2001)).

[0250] Small interfering RNAs (siRNAs) are powerful sequence-specific reagents designed to suppress the expression of genes in cultured mammalian cells through a process known as RNA interference (RNAi). Elbashir, S. M. et al. Nature 411:494-498 (2001); Caplen, N. J. et al. Proc. Natl. Acad. Sci. USA 98:9742-9747 (2001); Harborth, J. et al. J. Cell Sci. 114:4557-4565 (2001). The term “short interfering RNA” or “siRNA” refers to a double stranded nucleic acid molecule capable of RNA interference “RNAi”, (see Kreutzer et al., WO 00/44895; Zemicka-Goetz et al. WO 01/36646; Fire, WO 99/32619; Mello and Fire, WO 01/29058). As used herein, siRNA molecules are limited to RNA molecules but further encompasses chemically modified nucleotides and non-nucleotides. siRNA gene-targeting experiments have been carried out by transient siRNA transfer into cells (achieved by such classic methods as liposome-mediated transfection, electroporation, or microinjection).

[0251] Molecules of siRNA are 21- to 23-nucleotide RNAs, with characteristic 2- to 3-nucleotide 3′-overhanging ends resembling the RNase III processing products of long double-stranded RNAs (dsRNAs) that normally initiate RNAi. When introduced into a cell, they assemble with yet-to-be-identified proteins of an endonuclease complex (RNA-induced silencing complex), which then guides target mRNA cleavage. As a consequence of degradation of the targeted mRNA, cells with a specific phenotype characteristic of suppression of the corresponding protein product are obtained. The small size of siRNAs, compared with traditional antisense molecules, prevents activation of the dsRNA-inducible interferon system present in mammalian cells. This avoids the nonspecific phenotypes normally produced by dsRNA larger than 30 base pairs in somatic cells.

[0252] Intracellular transcription of small RNA molecules is achieved by cloning the siRNA templates into RNA polymerase III (Pol III) transcription units, which normally encode the small nuclear RNA (snRNA) U6 or the human RNase P RNA H1. Two approaches have been developed for expressing siRNAs: in the first, sense and antisense strands constituting the siRNA duplex are transcribed by individual promoters (Lee, N. S. et al. Nat. Biotechnol. 20, 500-505 (2002). Miyagishi, M. & Taira, K. Nat. Biotechnol. 20, 497-500 (2002).); in the second, siRNAs are expressed as fold-back stem-loop structures that give rise to siRNAs after intracellular processing (Paul, C. P. et al. Nat. Biotechnol. 20:505-508 (2002)). The endogenous expression of siRNAs from introduced DNA templates is thought to overcome some limitations of exogenous siRNA delivery, in particular the transient loss of phenotype. U6 and H1 RNA promoters are members of the type III class of Pol III promoters. (Paule, M. R. & White, R. J. Nucleic Acids Res. 28, 1283-1298 (2000)).

[0253] Co-expression of sense and antisense siRNAs mediate silencing of target genes, whereas expression of sense or antisense siRNA alone do not greatly affect target gene expression. Transfection of plasmid DNA, rather than synthetic siRNAs, may appear advantageous, considering the danger of RNase contamination and the costs of chemically synthesized siRNAs or siRNA transcription kits. Stable expression of siRNAs allows new gene therapy applications, such as treatment of persistent viral infections. Considering the high specificity of siRNAs, the approach also allows the targeting of disease-derived transcripts with point mutations, such as RAS or TP53 oncogene transcripts, without alteration of the remaining wild-type allele. Finally, by high-throughput sequence analysis of the various genomes, the DNA-based methodology may also be a cost-effective alternative for automated genome-wide loss-of-function phenotypic analysis, especially when combined with miniaturized array-based phenotypic screens. (Ziauddin, J. & Sabatini, D. M. Nature 411:107-110 (2001)).

[0254] The presence of long dsRNAs in cells stimulates the activity of a ribonuclease III enzyme referred to as dicer. Dicer is involved in the processing of the dsRNA into short pieces of dsRNA known as short interfering RNAs (siRNA) (Berstein et al., 2001, Nature, 409:363 (2001)). Short interfering RNAs derived from dicer activity are typically about 21-23 nucleotides in length and comprise about 19 base pair duplexes. Dicer has also been implicated in the excision of 21 and 22 nucleotide small temporal RNAs (stRNA) from precursor RNA of conserved structure that are implicated in translational control (Hutvagner et al., Science, 293, 834 (2001)). The RNAi response also features an endonuclease complex containing a siRNA, commonly referred to as an RNA-induced silencing complex (RISC), which mediates cleavage of single stranded RNA having sequence homologous to the siRNA. Cleavage of the target RNA takes place in the middle of the region complementary to the guide sequence of the siRNA duplex (Elbashir et al., Genes Dev., 15, 188 (2001)).

[0255] This invention provides an expression system comprising an isolated nucleic acid molecule comprising a sequence capable of specifically hybridizing to the CA sequences. In an embodiment, the nucleic acid molecule is capable of inhibiting the expression of the CA protein. A method of inhibiting expression of CA inside a cell by a vector-directed expression of a short RNA which short RNA can fold in itself and create a double strand RNA having CA mRNA sequence identity and able to trigger posttranscriptional gene silencing, or RNA interference (RNAi), of the CA gene inside the cell. In another method a short double strand RNA having CA mRNA sequence identity is delivered inside the cell to trigger posttranscriptional gene silencing, or RNAi, of the CA gene. In various embodiments, the nucleic acid molecule is at least a 7 mer, at least a 10 mer, or at least a 20 mer. In a further embodiment, the sequence is unique.

(c) Pharmaceutical Compositions

[0256] Pharmaceutical compositions encompassed by the present invention include as active agent, the polypeptides, polynucleotides, antisense oligonucleotides, or antibodies of the invention disclosed herein in a therapeutically effective amount. An “effective amount” is an amount sufficient to effect beneficial or desired results, including clinical results. An effective amount can be administered in one or more administrations. For purposes of this invention, an effective amount of an adenoviral vector is an amount that is sufficient to palliate, ameliorate, stabilize, reverse, slow or delay the progression of the disease state.

[0257] The compositions can be used to treat cancer as well as metastases of primary cancer. In addition, the pharmaceutical compositions can be used in conjunction with conventional methods of cancer treatment, e.g., to sensitize tumors to radiation or conventional chemotherapy. The terms “treatment”, “treating”, “treat” and the like are used herein to generally refer to obtaining a desired pharmacologic and/or physiologic effect. The effect may be prophylactic in terms of completely or partially preventing a disease or symptom thereof and/or may be therapeutic in terms of a partial or complete stabilization or cure for a disease and/or adverse effect attributable to the disease. “Treatment” as used herein covers any treatment of a disease in a mammal, particularly a human, and includes: (a) preventing the disease or symptom from occurring in a subject which may be predisposed to the disease or symptom but has not yet been diagnosed as having it; (b) inhibiting the disease symptom, i.e., arresting its development; or (c) relieving the disease symptom, i.e., causing regression of the disease or symptom.

[0258] Where the pharmaceutical composition comprises an antibody that specifically binds to a gene product encoded by a differentially expressed polynucleotide, the antibody can be coupled to a drug for delivery to a treatment site or coupled to a detectable label to facilitate imaging of a site comprising cancer cells, such as prostate cancer cells. Methods for coupling antibodies to drugs and detectable labels are well known in the art, as are methods for imaging using detectable labels.

[0259] A “patient” for the purposes of the present invention includes both humans and other animals, particularly mammals, and organisms. Thus the methods are applicable to both human therapy and veterinary applications. In the preferred embodiment the patient is a mammal, and in the most preferred embodiment the patient is human.

[0260] The term “therapeutically effective amount” as used herein refers to an amount of a therapeutic agent to treat, ameliorate, or prevent a desired disease or condition, or to exhibit a detectable therapeutic or preventative effect. The effect can be detected by, for example, chemical markers or antigen levels. Therapeutic effects also include reduction in physical symptoms, such as decreased body temperature. The precise effective amount for a subject will depend upon the subject's size and health, the nature and extent of the condition, and the therapeutics or combination of therapeutics selected for administration. The effective amount for a given situation is determined by routine experimentation and is within the judgment of the clinician. For purposes of the present invention, an effective dose will generally be from about 0.01 mg/kg to about 5 mg/kg, or about 0.01 mg/kg to about 50 mg/kg or about 0.05 mg/kg to about 10 mg/kg of the compositions of the present invention in the individual to which it is administered.

[0261] A pharmaceutical composition can also contain a pharmaceutically acceptable carrier. The term “pharmaceutically acceptable carrier” refers to a carrier for administration of a therapeutic agent, such as antibodies or a polypeptide, genes, and other therapeutic agents. The term refers to any pharmaceutical carrier that does not itself induce the production of antibodies harmful to the individual receiving the composition, and which can be administered without undue toxicity. Suitable carriers can be large, slowly metabolized macromolecules such as proteins, polysaccharides, polylactic acids, polyglycolic acids, polymeric amino acids, amino acid copolymers, and inactive virus particles. Such carriers are well known to those of ordinary skill in the art. Pharmaceutically acceptable carriers in therapeutic compositions can include liquids such as water, saline, glycerol and ethanol. Auxiliary substances, such as wetting or emulsifying agents, pH buffering substances, and the like, can also be present in such vehicles. Typically, the therapeutic compositions are prepared as injectables, either as liquid solutions or suspensions; solid forms suitable for solution in, or suspension in, liquid vehicles prior to injection can also be prepared. Liposomes are included within the definition of a pharmaceutically acceptable carrier. Pharmaceutically acceptable salts can also be present in the pharmaceutical composition, e.g., mineral acid salts such as hydrochlorides, hydrobromides, phosphates, sulfates, and the like; and the salts of organic acids such as acetates, propionates, malonates, benzoates, and the like. A thorough discussion of pharmaceutically acceptable excipients is available in Remington: The Science and Practice of Pharmacy (1995) Alfonso Gennaro, Lippincott, Williams, & Wilkins.

[0262] The pharmaceutical compositions can be prepared in various forms, such as granules, tablets, pills, suppositories, capsules, suspensions, salves, lotions and the like. Pharmaceutical grade organic or inorganic carriers and/or diluents suitable for oral and topical use can be used to make up compositions containing the therapeutically-active compounds. Diluents known to the art include aqueous media, vegetable and animal oils and fats. Stabilizing agents, wetting and emulsifying agents, salts for varying the osmotic pressure or buffers for securing an adequate pH value, and skin penetration enhancers can be used as auxiliary agents.

[0263] The pharmaceutical compositions of the present invention comprise a CA protein in a form suitable for administration to a patient. In the preferred embodiment, the pharmaceutical compositions are in a water soluble form, such as being present as pharmaceutically acceptable salts, which is meant to include both acid and base addition salts. “Pharmaceutically acceptable acid addition salt” refers to those salts that retain the biological effectiveness of the free bases and that are not biologically or otherwise undesirable, formed with inorganic acids such as hydrochloric acid, hydrobromic acid, sulfuric acid, nitric acid, phosphoric acid and the like, and organic acids such as acetic acid, propionic acid, glycolic acid, pyruvic acid, oxalic acid, maleic acid, malonic acid, succinic acid, fumaric acid, tartaric acid, citric acid, benzoic acid, cinnamic acid, mandelic acid, methanesulfonic acid, ethanesulfonic acid, p-toluenesulfonic acid, salicylic acid and the like. “Pharmaceutically acceptable base addition salts” include those derived from inorganic bases such as sodium, potassium, lithium, ammonium, calcium, magnesium, iron, zinc, copper, manganese, aluminum salts and the like. Particularly preferred are the ammonium, potassium, sodium, calcium, and magnesium salts. Salts derived from pharmaceutically acceptable organic non-toxic bases include salts of primary, secondary, and tertiary amines, substituted amines including naturally occurring substituted amines, cyclic amines and basic ion exchange resins, such as isopropylamine, trimethylamine, diethylamine, triethylamine, tripropylamine, and ethanolamine.

[0264] The pharmaceutical compositions may also include one or more of the following: carrier proteins such as serum albumin; buffers; fillers such as microcrystalline cellulose, lactose, corn and other starches; binding agents; sweeteners and other flavoring agents; coloring agents; and polyethylene glycol. Additives are well known in the art, and are used in a variety of formulations.

[0265] The compounds having the desired pharmacological activity may be administered in a physiologically acceptable carrier to a host, as previously described. The agents may be administered in a variety of ways, orally, parenterally e.g., subcutaneously, intraperitoneally, intravascularly, etc. Depending upon the manner of introduction, the compounds may be formulated in a variety of ways. The concentration of therapeutically active compound in the formulation may vary from about 0.1-100% wgt/vol. Once formulated, the compositions contemplated by the invention can be (1) administered directly to the subject (e.g., as polynucleotide, polypeptides, small molecule agonists or antagonists, and the like); or (2) delivered ex vivo, to cells derived from the subject (e.g., as in ex vivo gene therapy). Direct delivery of the compositions will generally be accomplished by parenteral injection, e.g., subcutaneously, intraperitoneally, intravenously or intramuscularly, intratumoral or to the interstitial space of a tissue. Other modes of administration include oral and pulmonary administration, suppositories, and transdermal applications, needles, and gene guns or hyposprays. Dosage treatment can be a single dose schedule or a multiple dose schedule.

[0266] Methods for the ex vivo delivery and reimplantation of transformed cells into a subject are known in the art and described in e.g., International Publication No. WO 93/14778. Examples of cells useful in ex vivo applications include, for example, stem cells, particularly hematopoetic, lymph cells, macrophages, dendritic cells, or tumor cells. Generally, delivery of nucleic acids for both ex vivo and in vitro applications can be accomplished by, for example, dextran-mediated transfection, calcium phosphate precipitation, polybrene mediated transfection, protoplast fusion, electroporation, encapsulation of the polynucleotide(s) in liposomes, and direct microinjection of the DNA into nuclei, all well known in the art.

[0267] Once differential expression of a gene corresponding to a CA polynucleotide described herein has been found to correlate with a proliferative disorder, such as neoplasia, dysplasia, and hyperplasia, the disorder can be amenable to treatment by administration of a therapeutic agent based on the provided polynucleotide, corresponding polypeptide or other corresponding molecule (e.g., antisense, ribozyme, etc.). In other embodiments, the disorder can be amenable to treatment by administration of a small molecule drug that, for example, serves as an inhibitor (antagonist) of the function of the encoded gene product of a gene having increased expression in cancerous cells relative to normal cells or as an agonist for gene products that are decreased in expression in cancerous cells (e.g., to promote the activity of gene products that act as tumor suppressors).

[0268] The dose and the means of administration of the inventive pharmaceutical compositions are determined based on the specific qualities of the therapeutic composition, the condition, age, and weight of the patient, the progression of the disease, and other relevant factors. For example, administration of polynucleotide therapeutic compositions agents includes local or systemic administration, including injection, oral administration, particle gun or catheterized administration, and topical administration. Preferably, the therapeutic polynucleotide composition contains an expression construct comprising a promoter operably linked to a polynucleotide of at least 12, 22, 25, 30, or 35 contiguous nt of the polynucleotide disclosed herein. Various methods can be used to administer the therapeutic composition directly to a specific site in the body. For example, a small metastatic lesion is located and the therapeutic composition injected several times in several different locations within the body of tumor. Alternatively, arteries that serve a tumor are identified, and the therapeutic composition injected into such an artery, in order to deliver the composition directly into the tumor. A tumor that has a necrotic center is aspirated and the composition injected directly into the now empty center of the tumor. An antisense composition is directly administered to the surface of the tumor, for example, by topical application of the composition. X-ray imaging is used to assist in certain of the above delivery methods.

[0269] Targeted delivery of therapeutic compositions containing an antisense polynucleotide, subgenomic polynucleotides, or antibodies to specific tissues can also be used. Receptor-mediated DNA delivery techniques are described in, for example, Findeis et al., Trends Biotechnol. (1993) 11:202; Chiou et al., Gene Therapeutics: Methods And Applications Of Direct Gene Transfer (J. A. Wolff, ed.) (1994); Wu et al., J. Biol. Chem. (1988) 263:621; Wu et al., J. Biol. Chem. (1994) 269:542; Zenke et al., Proc. Natl. Acad. Sci. (USA) (1990) 87:3655; Wu et al., J. Biol. Chem. (1991) 266:338. Therapeutic compositions containing a polynucleotide are administered in a range of about 100 ng to about 200 mg of DNA for local administration in a gene therapy protocol. Concentration ranges of about 500 ng to about 50 mg, about 1 μg to about 2 mg, about 5 μg to about 500 μg, and about 20 μg to about 100 μg of DNA can also be used during a gene therapy protocol. Factors such as method of action (e.g., for enhancing or inhibiting levels of the encoded gene product) and efficacy of transformation and expression are considerations that will affect the dosage required for ultimate efficacy of the antisense subgenomic polynucleotides. Where greater expression is desired over a larger area of tissue, larger amounts of antisense subgenomic polynucleotides or the same amounts re-administered in a successive protocol of administrations, or several administrations to different adjacent or close tissue portions of, for example, a tumor site, may be required to effect a positive therapeutic outcome. In all cases, routine experimentation in clinical trials will determine specific ranges for optimal therapeutic effect.

[0270] The therapeutic polynucleotides and polypeptides of the present invention can be delivered using gene delivery vehicles. The gene delivery vehicle can be of viral or non-viral origin (see generally, Jolly, Cancer Gene Therapy (1994) 1:51; Kimura, Human Gene Therapy (1994) 5:845; Connelly, Human Gene Therapy (1995) 1:185; and Kaplitt, Nature Genetics (1994) 6:148). Expression of such coding sequences can be induced using endogenous mammalian or heterologous promoters. Expression of the coding sequence can be either constitutive or regulated.

[0271] Viral-based vectors for delivery of a desired polynucleotide and expression in a desired cell are well known in the art. Exemplary viral-based vehicles include, but are not limited to, recombinant retroviruses (see, e.g., WO 90/07936; WO 94/03622; WO 93/25698; WO 93/25234; U.S. Pat. No. 5,219,740; WO 93/11230; WO 93/10218; U.S. Pat. No. 4,777,127; GB Patent No. 2,200,651; EP 0 345 242; and WO 91/02805), alphavirus-based vectors (e.g., Sindbis virus vectors, Semliki forest virus (ATCC VR-67; ATCC VR-1247), Ross River virus (ATCC VR-373; ATCC VR-1246) and Venezuelan equine encephalitis virus (ATCC VR-923; ATCC VR-1250; ATCC VR 1249; ATCC VR-532)), and adeno-associated virus (AAV) vectors (see, e.g., WO 94/12649, WO 93/03769; WO 93/19191; WO 94/28938; WO 95/11984 and WO 95/00655). Administration of DNA linked to killed adenovirus as described in Curiel, Hum. Gene Ther. (1992) 3:147 can also be employed.

[0272] Non-viral delivery vehicles and methods can also be employed, including, but not limited to, polycationic condensed DNA linked or unlinked to killed adenovirus alone (see, e.g., Curiel, Hum. Gene Ther. (1992) 3:147); ligand-linked DNA (see, e.g., Wu, J. Biol. Chem. (1989) 264:16985); eukaryotic cell delivery vehicles cells (see, e.g., U.S. Pat. No. 5,814,482; WO 95/07994; WO 96/17072; WO 95/30763; and WO 97/42338) and nucleic charge neutralization or fusion with cell membranes. Naked DNA can also be employed. Exemplary naked DNA introduction methods are described in WO 90/11092 and U.S. Pat. No. 5,580,859. Liposomes that can act as gene delivery vehicles are described in U.S. Pat. No. 5,422,120; WO 95/13796; WO 94/23697; WO 91/14445; and EP 0524968. Additional approaches are described in Philip, Mol. Cell Biol. (1994) 14:2411, and in Woffendin, Proc. Natl. Acad. Sci. (1994) 91:1581.

[0273] Further non-viral delivery suitable for use includes mechanical delivery systems such as the approach described in Woffendin et al., Proc. Natl. Acad. Sci. USA (1994) 91(24):11581. Moreover, the coding sequence and the product of expression of such can be delivered through deposition of photopolymerized hydrogel materials or use of ionizing radiation (see, e.g., U.S. Pat. No. 5,206,152 and WO 92/11033). Other conventional methods for gene delivery that can be used for delivery of the coding sequence include, for example, use of hand-held gene transfer particle gun (see, e.g., U.S. Pat. No. 5,149,655); use of ionizing radiation for activating transferred gene (see, e.g., U.S. Pat. No. 5,206,152 and WO 92/11033).

[0274] The administration of the CA proteins and modulators of the present invention can be done in a variety of ways as discussed above, including, but not limited to, orally, subcutaneously, intravenously, intranasally, transdermally, intraperitoneally, intramuscularly, intrapulmonary, vaginally, rectally, or intraocularly. In some instances, for example, in the treatment of wounds and inflammation, the CA proteins and modulators may be directly applied as a solution or spray.

[0275] In a preferred embodiment, CA proteins and modulators are administered as therapeutic agents, and can be formulated as outlined above. Similarly, CA genes (including both the full-length sequence, partial sequences, or regulatory sequences of the CA coding regions) can be administered in gene therapy applications, as is known in the art. These CA genes can include antisense applications, either as gene therapy (i.e. for incorporation into the genome) or as antisense compositions, as will be appreciated by those in the art.

[0276] Thus, in one embodiment, methods of modulating CA gene activity in cells or organisms are provided. In one embodiment, the methods comprise administering to a cell an anti-CA antibody that reduces or eliminates the biological activity of an endogenous CA protein. Alternatively, the methods comprise administering to a cell or organism a recombinant nucleic acid encoding a CA protein. As will be appreciated by those in the art, this may be accomplished in any number of ways. In a preferred embodiment, for example when the CA sequence is down-regulated in cancer, the activity of the CA gene product is increased by increasing the amount of CA expression in the cell, for example by overexpressing the endogenous CA gene or by administering a gene encoding the CA sequence, using known gene-therapy techniques. In a preferred embodiment, the gene therapy techniques include the incorporation of the exogenous gene using enhanced homologous recombination (EHR), for example as described in PCT/US93/03868, hereby incorporated by reference in its entirety. Alternatively, for example when the CA sequence is up-regulated in cancer, the activity of the endogenous CA gene is decreased, for example by the administration of a CA antisense nucleic acid.

(d) Vaccines

[0277] In a preferred embodiment, CA genes are administered as DNA vaccines, either single genes or combinations of CA genes. Naked DNA vaccines are generally known in the art. Brower, Nature Biotechnology, 16:1304-1305 (1998).

[0278] In one embodiment, CA genes of the present invention are used as DNA vaccines. Methods for the use of genes as DNA vaccines are well known to one of ordinary skill in the art, and include placing a CA gene or portion of a CA gene under the control of a promoter for expression in a patient with cancer. The CA gene used for DNA vaccines can encode full-length CA proteins, but more preferably encodes portions of the CA proteins including peptides derived from the CA protein. In a preferred embodiment a patient is immunized with a DNA vaccine comprising a plurality of nucleotide sequences derived from a CA gene. Similarly, it is possible to immunize a patient with a plurality of CA genes or portions thereof. Without being bound by theory, expression of the polypeptide encoded by the DNA vaccine, cytotoxic T-cells, helper T-cells and antibodies are induced that recognize and destroy or eliminate cells expressing CA proteins.

[0279] In a preferred embodiment, the DNA vaccines include a gene encoding an adjuvant molecule with the DNA vaccine. Such adjuvant molecules include cytokines that increase the immunogenic response to the CA polypeptide encoded by the DNA vaccine. Additional or alternative adjuvants are known to those of ordinary skill in the art and find use in the invention.

(e) Antibodies

[0280] In one embodiment, a cancer inhibitor is an antibody as discussed above. In one embodiment, the CA proteins of the present invention may be used to generate polyclonal and monoclonal antibodies to CA proteins, which are useful as described herein. Similarly, the CA proteins can be coupled, using standard technology, to affinity chromatography columns. These columns may then be used to purify CA antibodies. In a preferred embodiment, the antibodies are generated to epitopes unique to a CA protein; that is, the antibodies show little or no cross-reactivity to other proteins. These antibodies find use in a number of applications. For example, the CA antibodies may be coupled to standard affinity chromatography columns and used to purify CA proteins. The antibodies may also be used therapeutically as blocking polypeptides, as outlined above, since they will specifically bind to the CA protein.

[0281] The present invention further provides methods for detecting the presence of and/or measuring a level of a polypeptide in a biological sample, which CA polypeptide is encoded by a CA polynucleotide that is differentially expressed in a cancer cell, using an antibody specific for the encoded polypeptide. The methods generally comprise: a) contacting the sample with an antibody specific for a polypeptide encoded by a CA polynucleotide that is differentially expressed in a prostate cancer cell; and b) detecting binding between the antibody and molecules of the sample.

[0282] Detection of specific binding of the antibody specific for the encoded cancer-associated polypeptide, when compared to a suitable control is an indication that encoded polypeptide is present in the sample. Suitable controls include a sample known not to contain the encoded CA polypeptide or known not to contain elevated levels of the polypeptide; such as normal tissue, and a sample contacted with an antibody not specific for the encoded polypeptide, e.g., an anti-idiotype antibody. A variety of methods to detect specific antibody-antigen interactions are known in the art and can be used in the method, including, but not limited to, standard immunohistological methods, immunoprecipitation, an enzyme immunoassay, and a radioimmunoassay. In general, the specific antibody will be detectably labeled, either directly or indirectly. Direct labels include radioisotopes; enzymes whose products are detectable (e.g., luciferase, β-galactosidase, and the like); fluorescent labels (e.g., fluorescein isothiocyanate, rhodamine, phycoerythrin, and the like); fluorescence emitting metals, e.g., ¹⁵²Eu, or others of the lanthanide series, attached to the antibody through metal chelating groups such as EDTA; chemiluminescent compounds, e.g., luminol, isoluminol, acridinium salts, and the like; bioluminescent compounds, e.g., luciferin, aequorin (green fluorescent protein), and the like. The antibody may be attached (coupled) to an insoluble support, such as a polystyrene plate or a bead. Indirect labels include second antibodies specific for antibodies specific for the encoded polypeptide (“first specific antibody”), wherein the second antibody is labeled as described above; and members of specific binding pairs, e.g., biotin-avidin, and the like. The biological sample may be brought into contact with and immobilized on a solid support or carrier, such as nitrocellulose, that is capable of immobilizing cells, cell particles, or soluble proteins. The support may then be washed with suitable buffers, followed by contacting with a detectably-labeled first specific antibody. Detection methods are known in the art and will be chosen as appropriate to the signal emitted by the detectable label. Detection is generally accomplished in comparison to suitable controls, and to appropriate standards.

[0283] In some embodiments, the methods are adapted for use in vivo, e.g., to locate or identify sites where cancer cells are present. In these embodiments, a detectably-labeled moiety, e.g., an antibody, which is specific for a cancer-associated polypeptide is administered to an individual (e.g., by injection), and labeled cells are located using standard imaging techniques, including, but not limited to, magnetic resonance imaging, computed tomography scanning, and the like. In this manner, cancer cells are differentially labeled.

(f) Detection and Diagnosis of Cancers

[0284] Without being bound by theory, it appears that the various CA sequences are important in cancers. Accordingly, disorders based on mutant or variant CA genes may be determined. In one embodiment, the invention provides methods for identifying cells containing variant CA genes comprising determining all or part of the sequence of at least one endogenous CA genes in a cell. As will be appreciated by those in the art, this may be done using any number of sequencing techniques. In a preferred embodiment, the invention provides methods of identifying the CA genotype of an individual comprising determining all or part of the sequence of at least one CA gene of the individual. This is generally done in at least one tissue of the individual, and may include the evaluation of a number of tissues or different samples of the same tissue. The method may include comparing the sequence of the sequenced CA gene to a known CA gene, i.e., a wild-type gene. As will be appreciated by those in the art, alterations in the sequence of some CA genes can be an indication of either the presence of the disease, or propensity to develop the disease, or prognosis evaluations.

[0285] The sequence of all or part of the CA gene can then be compared to the sequence of a known CA gene to determine if any differences exist. This can be done using any number of known homology programs, such as Bestfit, etc. In a preferred embodiment, the presence of a difference in the sequence between the CA gene of the patient and the known CA gene is indicative of a disease state or a propensity for a disease state, as outlined herein.

[0286] In a preferred embodiment, the CA genes are used as probes to determine the number of copies of the CA gene in the genome. For example, some cancers exhibit chromosomal deletions or insertions, resulting in an alteration in the copy number of a gene.

[0287] In another preferred embodiment CA genes are used as probes to determine the chromosomal location of the CA genes. Information such as chromosomal location finds use in providing a diagnosis or prognosis in particular when chromosomal abnormalities such as translocations, and the like are identified in CA gene loci.

[0288] The present invention provides methods of using the polynucleotides described herein for detecting cancer cells, facilitating diagnosis of cancer and the severity of a cancer (e.g., tumor grade, tumor burden, and the like) in a subject, facilitating a determination of the prognosis of a subject, and assessing the responsiveness of the subject to therapy (e.g., by providing a measure of therapeutic effect through, for example, assessing tumor burden during or following a chemotherapeutic regimen). Detection can be based on detection of a polynucleotide that is differentially expressed in a cancer cell, and/or detection of a polypeptide encoded by a polynucleotide that is differentially expressed in a cancer cell. The detection methods of the invention can be conducted in vitro or in vivo, on isolated cells, or in whole tissues or a bodily fluid e.g., blood, plasma, serum, urine, and the like).

[0289] In some embodiments, methods are provided for detecting a cancer cell by detecting expression in the cell of a transcript that is differentially expressed in a cancer cell. Any of a variety of known methods can be used for detection, including, but not limited to, detection of a transcript by hybridization with a polynucleotide that hybridizes to a polynucleotide that is differentially expressed in a prostate cancer cell; detection of a transcript by a polymerase chain reaction using specific oligonucleotide primers; in situ hybridization of a cell using as a probe a polynucleotide that hybridizes to a gene that is differentially expressed in a prostate cancer cell. The methods can be used to detect and/or measure mRNA levels of a gene that is differentially expressed in a cancer cell. In some embodiments, the methods comprise: a) contacting a sample with a polynucleotide that corresponds to a differentially expressed gene described herein under conditions that allow hybridization; and b) detecting hybridization, if any.

[0290] Detection of differential hybridization, when compared to a suitable control, is an indication of the presence in the sample of a polynucleotide that is differentially expressed in a cancer cell. Appropriate controls include, for example, a sample that is known not to contain a polynucleotide that is differentially expressed in a cancer cell, and use of a labeled polynucleotide of the same “sense” as the polynucleotide that is differentially expressed in the cancer cell. Conditions that allow hybridization are known in the art, and have been described in more detail above. Detection can also be accomplished by any known method, including, but not limited to, in situ hybridization, PCR (polymerase chain reaction), RT-PCR (reverse transcription-PCR), TMA, bDNA, and Nasbau and “Northern” or RNA blotting, or combinations of such techniques, using a suitably labeled polynucleotide. A variety of labels and labeling methods for polynucleotides are known in the art and can be used in the assay methods of the invention. Specificity of hybridization can be determined by comparison to appropriate controls.

[0291] Polynucleotides generally comprising at least 10 nt, at least 12 nt or at least 15 contiguous nucleotides of a polynucleotide provided herein, such as, for example, those having the sequence as depicted in Tables 1-124, are used for a variety of purposes, such as probes for detection of and/or measurement of, transcription levels of a polynucleotide that is differentially expressed in a prostate cancer cell. As will be readily appreciated by the ordinarily skilled artisan, the probe can be detectably labeled and contacted with, for example, an array comprising immobilized polynucleotides obtained from a test sample (e.g., mRNA). Alternatively, the probe can be immobilized on an array and the test sample detectably labeled. These and other variations of the methods of the invention are well within the skill in the art and are within the scope of the invention.

[0292] Nucleotide probes are used to detect expression of a gene corresponding to the provided polynucleotide. In Northern blots, mRNA is separated electrophoretically and contacted with a probe. A probe is detected as hybridizing to an mRNA species of a particular size. The amount of hybridization can be quantitated to determine relative amounts of expression, for example under a particular condition. Probes are used for in situ hybridization to cells to detect expression. Probes can also be used in vivo for diagnostic detection of hybridizing sequences. Probes are typically labeled with a radioactive isotope. Other types of detectable labels can be used such as chromophores, fluorophores, and enzymes. Other examples of nucleotide hybridization assays are described in WO92/02526 and U.S. Pat. No. 5,124,246.

[0293] PCR is another means for detecting small amounts of target nucleic acids (see, e.g., Mullis et al., Meth. Enzymol. (1987) 155:335; U.S. Pat. No. 4,683,195; and U.S. Pat. No. 4,683,202). Two primer oligonucleotides that hybridize with the target nucleic acids are used to prime the reaction. The primers can be composed of sequence within or 3′ and 5′ to the CA polynucleotides disclosed herein. Alternatively, if the primers are 3′ and 5′ to these polynucleotides, they need not hybridize to them or the complements. After amplification of the target with a thermostable polymerase, the amplified target nucleic acids can be detected by methods known in the art, e.g., Southern blot. mRNA or cDNA can also be detected by traditional blotting techniques (e.g., Southern blot, Northern blot, etc.) described in Sambrook et al., “Molecular Cloning: A Laboratory Manual” (New York, Cold Spring Harbor Laboratory, 1989) (e.g., without PCR amplification). In general, mRNA or cDNA generated from mRNA using a polymerase enzyme can be purified and separated using gel electrophoresis, and transferred to a solid support, such as nitrocellulose. The solid support is exposed to a labeled probe, washed to remove any unhybridized probe, and duplexes containing the labeled probe are detected.

[0294] Methods using PCR amplification can be performed on the DNA from a single cell, although it is convenient to use at least about 10⁵ cells. The use of the polymerase chain reaction is described in Saiki et al. (1985) Science 239:487, and a review of current techniques may be found in Sambrook, et al. Molecular Cloning: A Laboratory Manual, CSH Press 1989, pp. 14.2-14.33. A detectable label may be included in the amplification reaction. Suitable detectable labels include fluorochromes, (e.g. fluorescein isothiocyanate (FITC), rhodamine, Texas Red, phycoerythrin, allophycocyanin, 6-carboxyfluorescein (6-FAM), 2′,7′-dimethoxy-4′,5′-dichloro-6-carboxyfluorescein, 6-carboxy-X-rhodamine (ROX), 6-carboxy-2′,4′,7′,4,7-hexachlorofluorescein (HEX), 5-carboxyfluorescein (5-FAM) or N,N,N′,N′-tetramethyl-6-carboxyrhodamine (TAMRA)), radioactive labels, (e.g. ³²P, ³⁵S, ³H, etc.), and the like. The label may be a two stage system, where the polynucleotides is conjugated to biotin, haptens, etc. having a high affinity binding partner, e.g. avidin, specific antibodies, etc., where the binding partner is conjugated to a detectable label. The label may be conjugated to one or both of the primers. Alternatively, the pool of nucleotides used in the amplification is labeled, so as to incorporate the label into the amplification product.

[0295] The detection methods can be provided as part of a kit. Thus, the invention further provides kits for detecting the presence and/or a level of a polynucleotide that is differentially expressed in a cancer cell (e.g., by detection of an mRNA encoded by the differentially expressed gene of interest), and/or a polypeptide encoded thereby, in a biological sample. Procedures using these kits can be performed by clinical laboratories, experimental laboratories, medical practitioners, or private individuals. The kits of the invention for detecting a polypeptide encoded by a polynucleotide that is differentially expressed in a cancer cell may comprise a moiety that specifically binds the polypeptide, which may be an antibody that binds the polypeptide or fragment thereof. The kits of the invention used for detecting a polynucleotide that is differentially expressed in a prostate cancer cell may comprise a moiety that specifically hybridizes to such a polynucleotide. The kit may optionally provide additional components that are useful in the procedure, including, but not limited to, buffers, developing reagents, labels, reacting surfaces, means for detection, control samples, standards, instructions, and interpretive information. Accordingly, the present invention provides kits for detecting prostate cancer comprising at least one of polynucleotides having the sequence as shown in Tables 1-124 or fragments thereof.

[0296] The present invention further relates to methods of detecting/diagnosing a neoplastic or preneoplastic condition in a mammal (for example, a human). “Diagnosis” as used herein generally includes determination of a subject's susceptibility to a disease or disorder, determination as to whether a subject is presently affected by a disease or disorder, prognosis of a subject affected by a disease or disorder (e.g., identification of pre-metastatic or metastatic cancerous states, stages of cancer, or responsiveness of cancer to therapy), and therametrics (e.g., monitoring a subject's condition to provide information as to the effect or efficacy of therapy).

[0297] The terms “treatment”, “treating”, “treat” and the like are used herein to generally refer to obtaining a desired pharmacologic and/or physiologic effect. The effect may be prophylactic in terms of completely or partially preventing a disease or symptom thereof and/or may be therapeutic in terms of a partial or complete stabilization or cure for a disease and/or adverse effect attributable to the disease. “Treatment” as used herein covers any treatment of a disease in a mammal, particularly a human, and includes: (a) preventing the disease or symptom from occurring in a subject which may be predisposed to the disease or symptom but has not yet been diagnosed as having it; (b) inhibiting the disease symptom, i.e., arresting its development; or (c) relieving the disease symptom, i.e., causing regression of the disease or symptom.

[0298] An “effective amount” is an amount sufficient to effect beneficial or desired results, including clinical results. An effective amount can be administered in one or more administrations.

[0299] A “cell sample” encompasses a variety of sample types obtained from an individual and can be used in a diagnostic or monitoring assay. The definition encompasses blood and other liquid samples of biological origin, solid tissue samples such as a biopsy specimen or tissue cultures or cells derived therefrom, and the progeny thereof. The definition also includes samples that have been manipulated in any way after their procurement, such as by treatment with reagents, solubilization, or enrichment for certain components, such as proteins or polynucleotides. The term “cell sample” encompasses a clinical sample, and also includes cells in culture, cell supernatants, cell lysates, serum, plasma, biological fluid, and tissue samples.

[0300] As used herein, the terms “neoplastic cells”, “neoplasia”, “tumor”, “tumor cells”, “cancer” and “cancer cells”, (used interchangeably) refer to cells which exhibit relatively autonomous growth, so that they exhibit an aberrant growth phenotype characterized by a significant loss of control of cell proliferation (i.e., de-regulated cell division). Neoplastic cells can be malignant or benign.

[0301] The terms “individual,” “subject,” “host,” and “patient,” are used interchangeably herein and refer to any mammalian subject for whom diagnosis, treatment, or therapy is desired, particularly humans. Other subjects may include cattle, dogs, cats, guinea pigs, rabbits, rats, mice, horses, and so on. Examples of conditions that can be detected/diagnosed in accordance with these methods include cancers. Polynucleotides corresponding to genes that exhibit the appropriate expression pattern can be used to detect cancer in a subject. For a review of markers of cancer, see, e.g., Hanahan et al. Cell 100:57-70 (2000).

[0302] One detection/diagnostic method comprises: (a) obtaining from a mammal (e.g., a human) a biological sample, (b) detecting the presence in the sample of a CA protein and (c) comparing the amount of product present with that in a control sample. In accordance with this method, the presence in the sample of elevated levels of a CA gene product indicates that the subject has a neoplastic or preneoplastic condition.

[0303] Biological samples suitable for use in this method include biological fluids such as serum, plasma, pleural effusions, urine and cerebro-spinal fluid, CSF, tissue samples (e.g., mammary tumor or prostate tissue slices) can also be used in the method of the invention, including samples derived from biopsies. Cell cultures or cell extracts derived, for example, from tissue biopsies can also be used.

[0304] The compound is preferably a binding protein, e.g., an antibody, polyclonal or monoclonal, or antigen binding fragment thereof, which can be labeled with a detectable marker (e.g., fluorophore, chromophore or isotope, etc). Where appropriate, the compound can be attached to a solid support such as a bead, plate, filter, resin, etc. Determination of formation of the complex can be effected by contacting the complex with a further compound (e.g., an antibody) that specifically binds to the first compound (or complex). Like the first compound, the further compound can be attached to a solid support and/or can be labeled with a detectable marker.

[0305] The identification of elevated levels of CA protein in accordance with the present invention makes possible the identification of subjects (patients) that are likely to benefit from adjuvant therapy. For example, a biological sample from a post primary therapy subject (e.g., subject having undergone surgery) can be screened for the presence of circulating CA protein, the presence of elevated levels of the protein, determined by studies of normal populations, being indicative of residual tumor tissue. Similarly, tissue from the cut site of a surgically removed tumor can be examined (e.g., by immunofluorescence), the presence of elevated levels of product (relative to the surrounding tissue) being indicative of incomplete removal of the tumor. The ability to identify such subjects makes it possible to tailor therapy to the needs of the particular subject. Subjects undergoing non-surgical therapy, e.g., chemotherapy or radiation therapy, can also be monitored, the presence in samples from such subjects of elevated levels of CA protein being indicative of the need for continued treatment. Staging of the disease (for example, for purposes of optimizing treatment regimens) can also be effected, for example, by biopsy e.g.,. with antibody specific for a CA protein.

(g) Animal Models and Transgenics

[0306] In another preferred embodiment CA genes find use in generating animal models of cancers, particularly lymphomas and carcinomas. As is appreciated by one of ordinary skill in the art, when the CA gene identified is repressed or diminished in CA tissue, gene therapy technology wherein antisense RNA directed to the CA gene will also diminish or repress expression of the gene. An animal generated as such serves as an animal model of CA that finds use in screening bioactive drug candidates. Similarly, gene knockout technology, for example as a result of homologous recombination with an appropriate gene targeting vector, will result in the absence of the CA protein. When desired, tissue-specific expression or knockout of the CA protein may be necessary.

[0307] It is also possible that the CA protein is overexpressed in cancer. As such, transgenic animals can be generated that overexpress the CA protein. Depending on the desired expression level, promoters of various strengths can be employed to express the transgene. Also, the number of copies of the integrated transgene can be determined and compared for a determination of the expression level of the transgene. Animals generated by such methods find use as animal models of CA and are additionally useful in screening for bioactive molecules to treat cancer.

Characterization of CA Sequences

[0308] The CA nucleic acid sequences of the invention are depicted in Tables 1-124. The sequences in each Table include genomic DNA sequence (mouse genomic sequences mDxx-yyy; human genomic sequences hDxx-yyy), sequence corresponding to the mRNA(s) generated therefrom (mRxx-yyy; hRxx-yyy) and amino acid sequences of the proteins (mPxx-yyy; hPxx-yyy) encoded by the mRNA for both mouse and human genes. N/A indicates a gene that has been identified, but for which there has not been a name ascribed.

[0309] The mouse and human genomic DNA sequence, sequence corresponding to the mRNA(s) generated therefrom and amino acid sequences of the proteins as shown in Tables 1-124 are described according to SEQ ID NOS as follows in Table 125.

TABLE 125

| Designation | SEQ ID NO: | Type of Sequence |
|---|---|---|
| mD1-004 | SEQ ID NO: 1 | MOUSE GENOMIC SEQUENCE |
| mR1-004 | SEQ ID NO: 2 | MOUSE mRNA SEQUENCE |
| mP1-004 | SEQ ID NO: 3 | MOUSE PROTEIN SEQUENCE |
| hD1-004 | SEQ ID NO: 4 | HUMAN GENOMIC SEQUENCE |
| hR1-004 | SEQ ID NO: 5 | HUMAN mRNA SEQUENCE |
| hP1-004 | SEQ ID NO: 6 | HUMAN PROTEIN SEQUENCE |
| mD1-007 | SEQ ID NO: 7 | MOUSE GENOMIC SEQUENCE |
| mR1-007 | SEQ ID NO: 8 | MOUSE mRNA SEQUENCE |
| mP1-007 | SEQ ID NO: 9 | MOUSE PROTEIN SEQUENCE |
| hD1-007 | SEQ ID NO: 10 | HUMAN GENOMIC SEQUENCE |
| hR1-007 | SEQ ID NO: 11 | HUMAN mRNA SEQUENCE |
| hP1-007 | SEQ ID NO: 12 | HUMAN PROTEIN SEQUENCE |
| mD1-010 | SEQ ID NO: 13 | MOUSE GENOMIC SEQUENCE |
| mR1-010 | SEQ ID NO: 14 | MOUSE mRNA SEQUENCE |
| mP1-010 | SEQ ID NO: 15 | MOUSE PROTEIN SEQUENCE |
| hD1-010 | SEQ ID NO: 16 | HUMAN GENOMIC SEQUENCE |
| hR1-010 | SEQ ID NO: 17 | HUMAN mRNA SEQUENCE |
| hP1-010 | SEQ ID NO: 18 | HUMAN PROTEIN SEQUENCE |
| hR1-010 | SEQ ID NO: 19 | HUMAN mRNA SEQUENCE |
| hP1-010 | SEQ ID NO: 20 | HUMAN PROTEIN SEQUENCE |
| hR1-010 | SEQ ID NO: 21 | HUMAN mRNA SEQUENCE |
| hP1-010 | SEQ ID NO: 22 | HUMAN PROTEIN SEQUENCE |
| mD2-003 | SEQ ID NO: 23 | MOUSE GENOMIC SEQUENCE |
| mR2-003 | SEQ ID NO: 24 | MOUSE mRNA SEQUENCE |
| mP2-003 | SEQ ID NO: 25 | MOUSE PROTEIN SEQUENCE |
| hD2-003 | SEQ ID NO: 26 | HUMAN GENOMIC SEQUENCE |
| hR2-003 | SEQ ID NO: 27 | HUMAN mRNA SEQUENCE |
| hP2-003 | SEQ ID NO: 28 | HUMAN PROTEIN SEQUENCE |
| mD2-010 | SEQ ID NO: 29 | MOUSE GENOMIC SEQUENCE |
| mR2-010 | SEQ ID NO: 30 | MOUSE mRNA SEQUENCE |
| mP2-010 | SEQ ID NO: 31 | MOUSE PROTEIN SEQUENCE |
| hD2-010 | SEQ ID NO: 32 | HUMAN GENOMIC SEQUENCE |
| hR2-010 | SEQ ID NO: 33 | HUMAN mRNA SEQUENCE |
| hP2-010 | SEQ ID NO: 34 | HUMAN PROTEIN SEQUENCE |
| mD2-011 | SEQ ID NO: 35 | MOUSE GENOMIC SEQUENCE |
| mR2-011 | SEQ ID NO: 36 | MOUSE mRNA SEQUENCE |
| mP2-011 | SEQ ID NO: 37 | MOUSE PROTEIN SEQUENCE |
| mR2-011 | SEQ ID NO: 38 | MOUSE mRNA SEQUENCE |
| mP2-011 | SEQ ID NO: 39 | MOUSE PROTEIN SEQUENCE |
| mR2-011 | SEQ ID NO: 40 | MOUSE mRNA SEQUENCE |
| mP2-011 | SEQ ID NO: 41 | MOUSE PROTEIN SEQUENCE |
| mR2-011 | SEQ ID NO: 42 | MOUSE mRNA SEQUENCE |
| mP2-011 | SEQ ID NO: 43 | MOUSE PROTEIN SEQUENCE |
| mR2-011 | SEQ ID NO: 44 | MOUSE mRNA SEQUENCE |
| mP2-011 | SEQ ID NO: 45 | MOUSE PROTEIN SEQUENCE |
| hD2-011 | SEQ ID NO: 46 | HUMAN GENOMIC SEQUENCE |
| hR2-011 | SEQ ID NO: 47 | HUMAN mRNA SEQUENCE |
| hP2-011 | SEQ ID NO: 48 | HUMAN PROTEIN SEQUENCE |
| hR2-011 | SEQ ID NO: 49 | HUMAN mRNA SEQUENCE |
| hP2-011 | SEQ ID NO: 50 | HUMAN PROTEIN SEQUENCE |
| hR2-011 | SEQ ID NO: 51 | HUMAN mRNA SEQUENCE |
| hP2-011 | SEQ ID NO: 52 | HUMAN PROTEIN SEQUENCE |
| hR2-011 | SEQ ID NO: 53 | HUMAN mRNA SEQUENCE |
| hP2-011 | SEQ ID NO: 54 | HUMAN PROTEIN SEQUENCE |
| hR2-011 | SEQ ID NO: 55 | HUMAN mRNA SEQUENCE |
| hP2-011 | SEQ ID NO: 56 | HUMAN PROTEIN SEQUENCE |
| mD2-019 | SEQ ID NO: 57 | MOUSE GENOMIC SEQUENCE |
| mR2-019 | SEQ ID NO: 58 | MOUSE mRNA SEQUENCE |
| mP2-019 | SEQ ID NO: 59 | MOUSE PROTEIN SEQUENCE |
| hD2-019 | SEQ ID NO: 60 | HUMAN GENOMIC SEQUENCE |
| hR2-019 | SEQ ID NO: 61 | HUMAN mRNA SEQUENCE |
| hP2-019 | SEQ ID NO: 62 | HUMAN PROTEIN SEQUENCE |
| hR2-019 | SEQ ID NO: 63 | HUMAN mRNA SEQUENCE |
| hP2-019 | SEQ ID NO: 64 | HUMAN PROTEIN SEQUENCE |
| hR2-019 | SEQ ID NO: 65 | HUMAN mRNA SEQUENCE |
| hP2-019 | SEQ ID NO: 66 | HUMAN PROTEIN SEQUENCE |
| mD2-023 | SEQ ID NO: 67 | MOUSE GENOMIC SEQUENCE |
| mR2-023 | SEQ ID NO: 68 | MOUSE mRNA SEQUENCE |
| mP2-023 | SEQ ID NO: 69 | MOUSE PROTEIN SEQUENCE |
| hD2-023 | SEQ ID NO: 70 | HUMAN GENOMIC SEQUENCE |
| hR2-023 | SEQ ID NO: 71 | HUMAN mRNA SEQUENCE |
| hP2-023 | SEQ ID NO: 72 | HUMAN PROTEIN SEQUENCE |
| mD2-028 | SEQ ID NO: 73 | MOUSE GENOMIC SEQUENCE |
| mR2-028 | SEQ ID NO: 74 | MOUSE mRNA SEQUENCE |
| mP2-028 | SEQ ID NO: 75 | MOUSE PROTEIN SEQUENCE |
| mR2-028 | SEQ ID NO: 76 | MOUSE mRNA SEQUENCE |
| mP2-028 | SEQ ID NO: 77 | MOUSE PROTEIN SEQUENCE |
| mR2-028 | SEQ ID NO: 78 | MOUSE mRNA SEQUENCE |
| mP2-028 | SEQ ID NO: 79 | MOUSE PROTEIN SEQUENCE |
| hD2-028 | SEQ ID NO: 80 | HUMAN GENOMIC SEQUENCE |
| hR2-028 | SEQ ID NO: 81 | HUMAN mRNA SEQUENCE |
| hP2-028 | SEQ ID NO: 82 | HUMAN PROTEIN SEQUENCE |
| hR2-028 | SEQ ID NO: 83 | HUMAN mRNA SEQUENCE |
| hP2-028 | SEQ ID NO: 84 | HUMAN PROTEIN SEQUENCE |
| hR2-028 | SEQ ID NO: 85 | HUMAN mRNA SEQUENCE |
| hP2-028 | SEQ ID NO: 86 | HUMAN PROTEIN SEQUENCE |
| hR2-028 | SEQ ID NO: 87 | HUMAN mRNA SEQUENCE |
| hP2-028 | SEQ ID NO: 88 | HUMAN PROTEIN SEQUENCE |
| hR2-028 | SEQ ID NO: 89 | HUMAN mRNA SEQUENCE |
| hP2-028 | SEQ ID NO: 90 | HUMAN PROTEIN SEQUENCE |
| mD2-030 | SEQ ID NO: 91 | MOUSE GENOMIC SEQUENCE |
| mR2-030 | SEQ ID NO: 92 | MOUSE mRNA SEQUENCE |
| mP2-030 | SEQ ID NO: 93 | MOUSE PROTEIN SEQUENCE |
| mR2-030 | SEQ ID NO: 94 | MOUSE mRNA SEQUENCE |
| mP2-030 | SEQ ID NO: 95 | MOUSE PROTEIN SEQUENCE |
| hD2-030 | SEQ ID NO: 96 | HUMAN GENOMIC SEQUENCE |
| hR2-030 | SEQ ID NO: 97 | HUMAN mRNA SEQUENCE |
| hP2-030 | SEQ ID NO: 98 | HUMAN PROTEIN SEQUENCE |
| hR2-030 | SEQ ID NO: 99 | HUMAN mRNA SEQUENCE |
| hP2-030 | SEQ ID NO: 100 | HUMAN PROTEIN SEQUENCE |
| hR2-030 | SEQ ID NO: 101 | HUMAN mRNA SEQUENCE |
| hP2-030 | SEQ ID NO: 102 | HUMAN PROTEIN SEQUENCE |
| hR2-030 | SEQ ID NO: 103 | HUMAN mRNA SEQUENCE |
| hP2-030 | SEQ ID NO: 104 | HUMAN PROTEIN SEQUENCE |
| hR2-030 | SEQ ID NO: 105 | HUMAN mRNA SEQUENCE |
| hP2-030 | SEQ ID NO: 106 | HUMAN PROTEIN SEQUENCE |
| hR2-030 | SEQ ID NO: 107 | HUMAN mRNA SEQUENCE |
| hP2-030 | SEQ ID NO: 108 | HUMAN PROTEIN SEQUENCE |
| hR2-030 | SEQ ID NO: 109 | HUMAN mRNA SEQUENCE |
| hP2-030 | SEQ ID NO: 110 | HUMAN PROTEIN SEQUENCE |
| mD3-002 | SEQ ID NO: 111 | MOUSE GENOMIC SEQUENCE |
| mR3-002 | SEQ ID NO: 112 | MOUSE mRNA SEQUENCE |
| mP3-002 | SEQ ID NO: 113 | MOUSE PROTEIN SEQUENCE |
| hD3-002 | SEQ ID NO: 114 | HUMAN GENOMIC SEQUENCE |
| hR3-002 | SEQ ID NO: 115 | HUMAN mRNA SEQUENCE |
| hP3-002 | SEQ ID NO: 116 | HUMAN PROTEIN SEQUENCE |
| hR3-002 | SEQ ID NO: 117 | HUMAN mRNA SEQUENCE |
| hP3-002 | SEQ ID NO: 118 | HUMAN PROTEIN SEQUENCE |
| hR3-002 | SEQ ID NO: 119 | HUMAN mRNA SEQUENCE |
| hP3-002 | SEQ ID NO: 120 | HUMAN PROTEIN SEQUENCE |
| hR3-002 | SEQ ID NO: 121 | HUMAN mRNA SEQUENCE |
| hP3-002 | SEQ ID NO: 122 | HUMAN PROTEIN SEQUENCE |
| hR3-002 | SEQ ID NO: 123 | HUMAN mRNA SEQUENCE |
| hP3-002 | SEQ ID NO: 124 | HUMAN PROTEIN SEQUENCE |
| hR3-002 | SEQ ID NO: 125 | HUMAN mRNA SEQUENCE |
| hP3-002 | SEQ ID NO: 126 | HUMAN PROTEIN SEQUENCE |
| hR3-002 | SEQ ID NO: 127 | HUMAN mRNA SEQUENCE |
| hP3-002 | SEQ ID NO: 128 | HUMAN PROTEIN SEQUENCE |
| hR3-002 | SEQ ID NO: 129 | HUMAN mRNA SEQUENCE |
| hP3-002 | SEQ ID NO: 130 | HUMAN PROTEIN SEQUENCE |
| mD3-008 | SEQ ID NO: 131 | MOUSE GENOMIC SEQUENCE |
| mR3-008 | SEQ ID NO: 132 | MOUSE mRNA SEQUENCE |
| mP3-008 | SEQ ID NO: 133 | MOUSE PROTEIN SEQUENCE |
| mD3-008 | SEQ ID NO: 134 | MOUSE GENOMIC SEQUENCE |
| mR3-008 | SEQ ID NO: 135 | MOUSE mRNA SEQUENCE |
| mP3-008 | SEQ ID NO: 136 | MOUSE PROTEIN SEQUENCE |
| hD3-008 | SEQ ID NO: 137 | HUMAN GENOMIC SEQUENCE |
| hR3-008 | SEQ ID NO: 138 | HUMAN mRNA SEQUENCE |
| hP3-008 | SEQ ID NO: 139 | HUMAN PROTEIN SEQUENCE |
| hR3-008 | SEQ ID NO: 140 | HUMAN mRNA SEQUENCE |
| hP3-008 | SEQ ID NO: 141 | HUMAN PROTEIN SEQUENCE |
| hR3-008 | SEQ ID NO: 142 | HUMAN mRNA SEQUENCE |
| hP3-008 | SEQ ID NO: 143 | HUMAN PROTEIN SEQUENCE |
| hR3-008 | SEQ ID NO: 144 | HUMAN mRNA SEQUENCE |
| hP3-008 | SEQ ID NO: 145 | HUMAN PROTEIN SEQUENCE |
| hR3-008 | SEQ ID NO: 146 | HUMAN mRNA SEQUENCE |
| hP3-008 | SEQ ID NO: 147 | HUMAN PROTEIN SEQUENCE |
| hR3-008 | SEQ ID NO: 148 | HUMAN mRNA SEQUENCE |
| hP3-008 | SEQ ID NO: 149 | HUMAN PROTEIN SEQUENCE |
| mD3-010 | SEQ ID NO: 150 | MOUSE GENOMIC SEQUENCE |
| mR3-010 | SEQ ID NO: 151 | MOUSE mRNA SEQUENCE |
| mP3-010 | SEQ ID NO: 152 | MOUSE PROTEIN SEQUENCE |
| hD3-010 | SEQ ID NO: 153 | HUMAN GENOMIC SEQUENCE |
| hR3-010 | SEQ ID NO: 154 | HUMAN mRNA SEQUENCE |
| hP3-010 | SEQ ID NO: 155 | HUMAN PROTEIN SEQUENCE |
| hR3-010 | SEQ ID NO: 156 | HUMAN mRNA SEQUENCE |
| hP3-010 | SEQ ID NO: 157 | HUMAN PROTEIN SEQUENCE |
| hR3-010 | SEQ ID NO: 158 | HUMAN mRNA SEQUENCE |
| hP3-010 | SEQ ID NO: 159 | HUMAN PROTEIN SEQUENCE |
| hR3-010 | SEQ ID NO: 160 | HUMAN mRNA SEQUENCE |
| hP3-010 | SEQ ID NO: 161 | HUMAN PROTEIN SEQUENCE |
| hR3-010 | SEQ ID NO: 162 | HUMAN mRNA SEQUENCE |
| hP3-010 | SEQ ID NO: 163 | HUMAN PROTEIN SEQUENCE |
| hR3-010 | SEQ ID NO: 164 | HUMAN mRNA SEQUENCE |
| hP3-010 | SEQ ID NO: 165 | HUMAN PROTEIN SEQUENCE |
| hR3-010 | SEQ ID NO: 166 | HUMAN mRNA SEQUENCE |
| hP3-010 | SEQ ID NO: 167 | HUMAN PROTEIN SEQUENCE |
| hR3-010 | SEQ ID NO: 168 | HUMAN mRNA SEQUENCE |
| hP3-010 | SEQ ID NO: 169 | HUMAN PROTEIN SEQUENCE |
| mD3-011 | SEQ ID NO: 170 | MOUSE GENOMIC SEQUENCE |
| mR3-011 | SEQ ID NO: 171 | MOUSE mRNA SEQUENCE |
| mP3-011 | SEQ ID NO: 172 | MOUSE PROTEIN SEQUENCE |
| hD3-011 | SEQ ID NO: 173 | HUMAN GENOMIC SEQUENCE |
| hR3-011 | SEQ ID NO: 174 | HUMAN mRNA SEQUENCE |
| hP3-011 | SEQ ID NO: 175 | HUMAN PROTEIN SEQUENCE |
| hR3-011 | SEQ ID NO: 176 | HUMAN mRNA SEQUENCE |
| hP3-011 | SEQ ID NO: 177 | HUMAN PROTEIN SEQUENCE |
| hR3-011 | SEQ ID NO: 178 | HUMAN mRNA SEQUENCE |
| hP3-011 | SEQ ID NO: 179 | HUMAN PROTEIN SEQUENCE |
| hR3-011 | SEQ ID NO: 180 | HUMAN mRNA SEQUENCE |
| hP3-011 | SEQ ID NO: 181 | HUMAN PROTEIN SEQUENCE |
| mD3-019 | SEQ ID NO: 182 | MOUSE GENOMIC SEQUENCE |
| mR3-019 | SEQ ID NO: 183 | MOUSE mRNA SEQUENCE |
| mP3-019 | SEQ ID NO: 184 | MOUSE PROTEIN SEQUENCE |
| mR3-019 | SEQ ID NO: 185 | MOUSE mRNA SEQUENCE |
| mP3-019 | SEQ ID NO: 186 | MOUSE PROTEIN SEQUENCE |
| hD3-019 | SEQ ID NO: 187 | HUMAN GENOMIC SEQUENCE |
| hR3-019 | SEQ ID NO: 188 | HUMAN mRNA SEQUENCE |
| hP3-019 | SEQ ID NO: 189 | HUMAN PROTEIN SEQUENCE |
| hR3-019 | SEQ ID NO: 190 | HUMAN mRNA SEQUENCE |
| hP3-019 | SEQ ID NO: 191 | HUMAN PROTEIN SEQUENCE |
| hR3-019 | SEQ ID NO: 192 | HUMAN mRNA SEQUENCE |
| hP3-019 | SEQ ID NO: 193 | HUMAN PROTEIN SEQUENCE |
| hR3-019 | SEQ ID NO: 194 | HUMAN mRNA SEQUENCE |
| hP3-019 | SEQ ID NO: 195 | HUMAN PROTEIN SEQUENCE |
| hR3-019 | SEQ ID NO: 196 | HUMAN mRNA SEQUENCE |
| hP3-019 | SEQ ID NO: 197 | HUMAN PROTEIN SEQUENCE |
| hR3-019 | SEQ ID NO: 198 | HUMAN mRNA SEQUENCE |
| hP3-019 | SEQ ID NO: 199 | HUMAN PROTEIN SEQUENCE |
| hR3-019 | SEQ ID NO: 200 | HUMAN mRNA SEQUENCE |
| hP3-019 | SEQ ID NO: 201 | HUMAN PROTEIN SEQUENCE |
| hR3-019 | SEQ ID NO: 202 | HUMAN mRNA SEQUENCE |
| hP3-019 | SEQ ID NO: 203 | HUMAN PROTEIN SEQUENCE |
| hR3-019 | SEQ ID NO: 204 | HUMAN mRNA SEQUENCE |
| hP3-019 | SEQ ID NO: 205 | HUMAN PROTEIN SEQUENCE |
| mD3-023 | SEQ ID NO: 206 | MOUSE GENOMIC SEQUENCE |
| mR3-023 | SEQ ID NO: 207 | MOUSE mRNA SEQUENCE |
| mP3-023 | SEQ ID NO: 208 | MOUSE PROTEIN SEQUENCE |
| hD3-023 | SEQ ID NO: 209 | HUMAN GENOMIC SEQUENCE |
| hR3-023 | SEQ ID NO: 210 | HUMAN mRNA SEQUENCE |
| hP3-023 | SEQ ID NO: 211 | HUMAN PROTEIN SEQUENCE |
| hR3-023 | SEQ ID NO: 212 | HUMAN mRNA SEQUENCE |
| hP3-023 | SEQ ID NO: 213 | HUMAN PROTEIN SEQUENCE |
| hR3-023 | SEQ ID NO: 214 | HUMAN mRNA SEQUENCE |
| hP3-023 | SEQ ID NO: 215 | HUMAN PROTEIN SEQUENCE |
| hR3-023 | SEQ ID NO: 216 | HUMAN mRNA SEQUENCE |
| hP3-023 | SEQ ID NO: 217 | HUMAN PROTEIN SEQUENCE |
| hR3-023 | SEQ ID NO: 218 | HUMAN mRNA SEQUENCE |
| hP3-023 | SEQ ID NO: 219 | HUMAN PROTEIN SEQUENCE |
| mD3-024 | SEQ ID NO: 220 | MOUSE GENOMIC SEQUENCE |
| mR3-024 | SEQ ID NO: 221 | MOUSE mRNA SEQUENCE |
| mP3-024 | SEQ ID NO: 222 | MOUSE PROTEIN SEQUENCE |
| hD3-024 | SEQ ID NO: 223 | HUMAN GENOMIC SEQUENCE |
| hR3-024 | SEQ ID NO: 224 | HUMAN mRNA SEQUENCE |
| hP3-024 | SEQ ID NO: 225 | HUMAN PROTEIN SEQUENCE |
| mD3-025 | SEQ ID NO: 226 | MOUSE GENOMIC SEQUENCE |
| mR3-025 | SEQ ID NO: 227 | MOUSE mRNA SEQUENCE |
| mP3-025 | SEQ ID NO: 228 | MOUSE PROTEIN SEQUENCE |
| hD3-025 | SEQ ID NO: 229 | HUMAN GENOMIC SEQUENCE |
| hR3-025 | SEQ ID NO: 230 | HUMAN mRNA SEQUENCE |
| hP3-025 | SEQ ID NO: 231 | HUMAN PROTEIN SEQUENCE |
| mD3-027 | SEQ ID NO: 232 | MOUSE GENOMIC SEQUENCE |
| mR3-027 | SEQ ID NO: 233 | MOUSE mRNA SEQUENCE |
| mP3-027 | SEQ ID NO: 234 | MOUSE PROTEIN SEQUENCE |
| hD3-027 | SEQ ID NO: 235 | HUMAN GENOMIC SEQUENCE |
| hR3-027 | SEQ ID NO: 236 | HUMAN mRNA SEQUENCE |
| hP3-027 | SEQ ID NO: 237 | HUMAN PROTEIN SEQUENCE |
| hR3-027 | SEQ ID NO: 238 | HUMAN mRNA SEQUENCE |
| hP3-027 | SEQ ID NO: 239 | HUMAN PROTEIN SEQUENCE |
| mD3-043 | SEQ ID NO: 240 | MOUSE GENOMIC SEQUENCE |
| mR3-043 | SEQ ID NO: 241 | MOUSE mRNA SEQUENCE |
| mP3-043 | SEQ ID NO: 242 | MOUSE PROTEIN SEQUENCE |
| hD3-043 | SEQ ID NO: 243 | HUMAN GENOMIC SEQUENCE |
| hR3-043 | SEQ ID NO: 244 | HUMAN mRNA SEQUENCE |
| hP3-043 | SEQ ID NO: 245 | HUMAN PROTEIN SEQUENCE |
| hR3-043 | SEQ ID NO: 246 | HUMAN mRNA SEQUENCE |
| hP3-043 | SEQ ID NO: 247 | HUMAN PROTEIN SEQUENCE |
| hR3-043 | SEQ ID NO: 248 | HUMAN mRNA SEQUENCE |
| hP3-043 | SEQ ID NO: 249 | HUMAN PROTEIN SEQUENCE |
| hR3-043 | SEQ ID NO: 250 | HUMAN mRNA SEQUENCE |
| hP3-043 | SEQ ID NO: 251 | HUMAN PROTEIN SEQUENCE |
| mD3-045 | SEQ ID NO: 252 | MOUSE GENOMIC SEQUENCE |
| mR3-045 | SEQ ID NO: 253 | MOUSE mRNA SEQUENCE |
| mP3-045 | SEQ ID NO: 254 | MOUSE PROTEIN SEQUENCE |
| hD3-045 | SEQ ID NO: 255 | HUMAN GENOMIC SEQUENCE |
| hR3-045 | SEQ ID NO: 256 | HUMAN mRNA SEQUENCE |
| hP3-045 | SEQ ID NO: 257 | HUMAN PROTEIN SEQUENCE |
| mD4-007 | SEQ ID NO: 258 | MOUSE GENOMIC SEQUENCE |
| mR4-007 | SEQ ID NO: 259 | MOUSE mRNA SEQUENCE |
| mP4-007 | SEQ ID NO: 260 | MOUSE PROTEIN SEQUENCE |
| hD4-007 | SEQ ID NO: 261 | HUMAN GENOMIC SEQUENCE |
| hR4-007 | SEQ ID NO: 262 | HUMAN mRNA SEQUENCE |
| hP4-007 | SEQ ID NO: 263 | HUMAN PROTEIN SEQUENCE |
| mD4-010 | SEQ ID NO: 264 | MOUSE GENOMIC SEQUENCE |
| mR4-010 | SEQ ID NO: 265 | MOUSE mRNA SEQUENCE |
| mP4-010 | SEQ ID NO: 266 | MOUSE PROTEIN SEQUENCE |
| hD4-010 | SEQ ID NO: 267 | HUMAN GENOMIC SEQUENCE |
| hR4-010 | SEQ ID NO: 268 | HUMAN mRNA SEQUENCE |
| hP4-010 | SEQ ID NO: 269 | HUMAN PROTEIN SEQUENCE |
| hR4-010 | SEQ ID NO: 270 | HUMAN mRNA SEQUENCE |
| hP4-010 | SEQ ID NO: 271 | HUMAN PROTEIN SEQUENCE |
| hR4-010 | SEQ ID NO: 272 | HUMAN mRNA SEQUENCE |
| hP4-010 | SEQ ID NO: 273 | HUMAN PROTEIN SEQUENCE |
| hR4-010 | SEQ ID NO: 274 | HUMAN mRNA SEQUENCE |
| hP4-010 | SEQ ID NO: 275 | HUMAN PROTEIN SEQUENCE |
| hR4-010 | SEQ ID NO: 276 | HUMAN mRNA SEQUENCE |
| hP4-010 | SEQ ID NO: 277 | HUMAN PROTEIN SEQUENCE |
| mD5-001 | SEQ ID NO: 278 | MOUSE GENOMIC SEQUENCE |
| mR5-001 | SEQ ID NO: 279 | MOUSE mRNA SEQUENCE |
| mP5-001 | SEQ ID NO: 280 | MOUSE PROTEIN SEQUENCE |
| hD5-001 | SEQ ID NO: 281 | HUMAN GENOMIC SEQUENCE |
| hR5-001 | SEQ ID NO: 282 | HUMAN mRNA SEQUENCE |
| hP5-001 | SEQ ID NO: 283 | HUMAN PROTEIN SEQUENCE |
| hR5-001 | SEQ ID NO: 284 | HUMAN mRNA SEQUENCE |
| hP5-001 | SEQ ID NO: 285 | HUMAN PROTEIN SEQUENCE |
| hR5-001 | SEQ ID NO: 286 | HUMAN mRNA SEQUENCE |
| hP5-001 | SEQ ID NO: 287 | HUMAN PROTEIN SEQUENCE |
| hR5-001 | SEQ ID NO: 288 | HUMAN mRNA SEQUENCE |
| hP5-001 | SEQ ID NO: 289 | HUMAN PROTEIN SEQUENCE |
| mD5-002 | SEQ ID NO: 290 | MOUSE GENOMIC SEQUENCE |
| mR5-002 | SEQ ID NO: 291 | MOUSE mRNA SEQUENCE |
| mP5-002 | SEQ ID NO: 292 | MOUSE PROTEIN SEQUENCE |
| hD5-002 | SEQ ID NO: 293 | HUMAN GENOMIC SEQUENCE |
| hR5-002 | SEQ ID NO: 294 | HUMAN mRNA SEQUENCE |
| hP5-002 | SEQ ID NO: 295 | HUMAN PROTEIN SEQUENCE |
| hR5-002 | SEQ ID NO: 296 | HUMAN mRNA SEQUENCE |
| hP5-002 | SEQ ID NO: 297 | HUMAN PROTEIN SEQUENCE |
| hR5-002 | SEQ ID NO: 298 | HUMAN mRNA SEQUENCE |
| hP5-002 | SEQ ID NO: 299 | HUMAN PROTEIN SEQUENCE |
| mD5-005 | SEQ ID NO: 300 | MOUSE GENOMIC SEQUENCE |
| mR5-005 | SEQ ID NO: 301 | MOUSE mRNA SEQUENCE |
| mP5-005 | SEQ ID NO: 302 | MOUSE PROTEIN SEQUENCE |
| hD5-005 | SEQ ID NO: 303 | HUMAN GENOMIC SEQUENCE |
| hR5-005 | SEQ ID NO: 304 | HUMAN mRNA SEQUENCE |
| hP5-005 | SEQ ID NO: 305 | HUMAN PROTEIN SEQUENCE |
| hR5-005 | SEQ ID NO: 306 | HUMAN mRNA SEQUENCE |
| hP5-005 | SEQ ID NO: 307 | HUMAN PROTEIN SEQUENCE |
| mD5-012 | SEQ ID NO: 308 | MOUSE GENOMIC SEQUENCE |
| mR5-012 | SEQ ID NO: 309 | MOUSE mRNA SEQUENCE |
| mP5-012 | SEQ ID NO: 310 | MOUSE PROTEIN SEQUENCE |
| hD5-012 | SEQ ID NO: 311 | HUMAN GENOMIC SEQUENCE |
| hR5-012 | SEQ ID NO: 312 | HUMAN mRNA SEQUENCE |
| hP5-012 | SEQ ID NO: 313 | HUMAN PROTEIN SEQUENCE |
| hR5-012 | SEQ ID NO: 314 | HUMAN mRNA SEQUENCE |
| hP5-012 | SEQ ID NO: 315 | HUMAN PROTEIN SEQUENCE |
| hR5-012 | SEQ ID NO: 316 | HUMAN mRNA SEQUENCE |
| hP5-012 | SEQ ID NO: 317 | HUMAN PROTEIN SEQUENCE |
| mD5-014 | SEQ ID NO: 318 | MOUSE GENOMIC SEQUENCE |
| mR5-014 | SEQ ID NO: 319 | MOUSE mRNA SEQUENCE |
| mP5-014 | SEQ ID NO: 320 | MOUSE PROTEIN SEQUENCE |
| hD5-014 | SEQ ID NO: 321 | HUMAN GENOMIC SEQUENCE |
| hR5-014 | SEQ ID NO: 322 | HUMAN mRNA SEQUENCE |
| hP5-014 | SEQ ID NO: 323 | HUMAN PROTEIN SEQUENCE |
| hR5-014 | SEQ ID NO: 324 | HUMAN mRNA SEQUENCE |
| hP5-014 | SEQ ID NO: 325 | HUMAN PROTEIN SEQUENCE |
| hR5-014 | SEQ ID NO: 326 | HUMAN mRNA SEQUENCE |
| hP5-014 | SEQ ID NO: 327 | HUMAN PROTEIN SEQUENCE |
| hR5-014 | SEQ ID NO: 328 | HUMAN mRNA SEQUENCE |
| hP5-014 | SEQ ID NO: 329 | HUMAN PROTEIN SEQUENCE |
| hR5-014 | SEQ ID NO: 330 | HUMAN mRNA SEQUENCE |
| hP5-014 | SEQ ID NO: 331 | HUMAN PROTEIN SEQUENCE |
| hR5-014 | SEQ ID NO: 332 | HUMAN mRNA SEQUENCE |
| hP5-014 | SEQ ID NO: 333 | HUMAN PROTEIN SEQUENCE |
| mD5-019 | SEQ ID NO: 334 | MOUSE GENOMIC SEQUENCE |
| mR5-019 | SEQ ID NO: 335 | MOUSE mRNA SEQUENCE |
| mP5-019 | SEQ ID NO: 336 | MOUSE PROTEIN SEQUENCE |
| mR5-019 | SEQ ID NO: 337 | MOUSE mRNA SEQUENCE |
| mP5-019 | SEQ ID NO: 338 | MOUSE PROTEIN SEQUENCE |
| mR5-019 | SEQ ID NO: 339 | MOUSE mRNA SEQUENCE |
| mP5-019 | SEQ ID NO: 340 | MOUSE PROTEIN SEQUENCE |
| hD5-019 | SEQ ID NO: 341 | HUMAN GENOMIC SEQUENCE |
| hR5-019 | SEQ ID NO: 342 | HUMAN mRNA SEQUENCE |
| hP5-019 | SEQ ID NO: 343 | HUMAN PROTEIN SEQUENCE |
| hR5-019 | SEQ ID NO: 344 | HUMAN mRNA SEQUENCE |
| hP5-019 | SEQ ID NO: 345 | HUMAN PROTEIN SEQUENCE |
| hR5-019 | SEQ ID NO: 346 | HUMAN mRNA SEQUENCE |
| hP5-019 | SEQ ID NO: 347 | HUMAN PROTEIN SEQUENCE |
| hR5-019 | SEQ ID NO: 348 | HUMAN mRNA SEQUENCE |
| hP5-019 | SEQ ID NO: 349 | HUMAN PROTEIN SEQUENCE |
| hR5-019 | SEQ ID NO: 350 | HUMAN mRNA SEQUENCE |
| hP5-019 | SEQ ID NO: 351 | HUMAN PROTEIN SEQUENCE |
| hR5-019 | SEQ ID NO: 352 | HUMAN mRNA SEQUENCE |
| hP5-019 | SEQ ID NO: 353 | HUMAN PROTEIN SEQUENCE |
| hR5-019 | SEQ ID NO: 354 | HUMAN mRNA SEQUENCE |
| hP5-019 | SEQ ID NO: 355 | HUMAN PROTEIN SEQUENCE |
| mD5-030 | SEQ ID NO: 356 | MOUSE GENOMIC SEQUENCE |
| mR5-030 | SEQ ID NO: 357 | MOUSE mRNA SEQUENCE |
| mP5-030 | SEQ ID NO: 358 | MOUSE PROTEIN SEQUENCE |
| hD5-030 | SEQ ID NO: 359 | HUMAN GENOMIC SEQUENCE |
| hR5-030 | SEQ ID NO: 360 | HUMAN mRNA SEQUENCE |
| hP5-030 | SEQ ID NO: 361 | HUMAN PROTEIN SEQUENCE |
| mD5-033 | SEQ ID NO: 362 | MOUSE GENOMIC SEQUENCE |
| mR5-033 | SEQ ID NO: 363 | MOUSE mRNA SEQUENCE |
| mP5-033 | SEQ ID NO: 364 | MOUSE PROTEIN SEQUENCE |
| mR5-033 | SEQ ID NO: 365 | MOUSE mRNA SEQUENCE |
| mP5-033 | SEQ ID NO: 366 | MOUSE PROTEIN SEQUENCE |
| hD5-033 | SEQ ID NO: 367 | HUMAN GENOMIC SEQUENCE |
| hR5-033 | SEQ ID NO: 368 | HUMAN mRNA SEQUENCE |
| hP5-033 | SEQ ID NO: 369 | HUMAN PROTEIN SEQUENCE |
| hR5-033 | SEQ ID NO: 370 | HUMAN mRNA SEQUENCE |
| hP5-033 | SEQ ID NO: 371 | HUMAN PROTEIN SEQUENCE |
| mD5-034 | SEQ ID NO: 372 | MOUSE GENOMIC SEQUENCE |
| mR5-034 | SEQ ID NO: 373 | MOUSE mRNA SEQUENCE |
| mP5-034 | SEQ ID NO: 374 | MOUSE PROTEIN SEQUENCE |
| hD5-034 | SEQ ID NO: 375 | HUMAN GENOMIC SEQUENCE |
| hR5-034 | SEQ ID NO: 376 | HUMAN mRNA SEQUENCE |
| hP5-034 | SEQ ID NO: 377 | HUMAN PROTEIN SEQUENCE |
| mD6-022 | SEQ ID NO: 378 | MOUSE GENOMIC SEQUENCE |
| mR6-022 | SEQ ID NO: 379 | MOUSE mRNA SEQUENCE |
| mP6-022 | SEQ ID NO: 380 | MOUSE PROTEIN SEQUENCE |
| mR6-022 | SEQ ID NO: 381 | MOUSE mRNA SEQUENCE |
| mP6-022 | SEQ ID NO: 382 | MOUSE PROTEIN SEQUENCE |
| hD6-022 | SEQ ID NO: 383 | HUMAN GENOMIC SEQUENCE |
| hR6-022 | SEQ ID NO: 384 | HUMAN mRNA SEQUENCE |
| hP6-022 | SEQ ID NO: 385 | HUMAN PROTEIN SEQUENCE |
| hR6-022 | SEQ ID NO: 386 | HUMAN mRNA SEQUENCE |
| hP6-022 | SEQ ID NO: 387 | HUMAN PROTEIN SEQUENCE |
| hR6-022 | SEQ ID NO: 388 | HUMAN mRNA SEQUENCE |
| hP6-022 | SEQ ID NO: 389 | HUMAN PROTEIN SEQUENCE |
| hR6-022 | SEQ ID NO: 390 | HUMAN mRNA SEQUENCE |
| hP6-022 | SEQ ID NO: 391 | HUMAN PROTEIN SEQUENCE |
| hR6-022 | SEQ ID NO: 392 | HUMAN mRNA SEQUENCE |
| hP6-022 | SEQ ID NO: 393 | HUMAN PROTEIN SEQUENCE |
| mD6-034 | SEQ ID NO: 394 | MOUSE GENOMIC SEQUENCE |
| mR6-034 | SEQ ID NO: 395 | MOUSE mRNA SEQUENCE |
| mP6-034 | SEQ ID NO: 396 | MOUSE PROTEIN SEQUENCE |
| hD6-034 | SEQ ID NO: 397 | HUMAN GENOMIC SEQUENCE |
| hR6-034 | SEQ ID NO: 398 | HUMAN mRNA SEQUENCE |
| hP6-034 | SEQ ID NO: 399 | HUMAN PROTEIN SEQUENCE |
| hR6-034 | SEQ ID NO: 400 | HUMAN mRNA SEQUENCE |
| hP6-034 | SEQ ID NO: 401 | HUMAN PROTEIN SEQUENCE |
| hR6-034 | SEQ ID NO: 402 | HUMAN mRNA SEQUENCE |
| hP6-034 | SEQ ID NO: 403 | HUMAN PROTEIN SEQUENCE |
| mD6-046 | SEQ ID NO: 404 | MOUSE GENOMIC SEQUENCE |
| mR6-046 | SEQ ID NO: 405 | MOUSE mRNA SEQUENCE |
| mP6-046 | SEQ ID NO: 406 | MOUSE PROTEIN SEQUENCE |
| hD6-046 | SEQ ID NO: 407 | HUMAN GENOMIC SEQUENCE |
| hR6-046 | SEQ ID NO: 408 | HUMAN mRNA SEQUENCE |
| hP6-046 | SEQ ID NO: 409 | HUMAN PROTEIN SEQUENCE |
| mD6-054 | SEQ ID NO: 410 | MOUSE GENOMIC SEQUENCE |
| mR6-054 | SEQ ID NO: 411 | MOUSE mRNA SEQUENCE |
| mP6-054 | SEQ ID NO: 412 | MOUSE PROTEIN SEQUENCE |
| hD6-054 | SEQ ID NO: 413 | HUMAN GENOMIC SEQUENCE |
| hR6-054 | SEQ ID NO: 414 | HUMAN mRNA SEQUENCE |
| hP6-054 | SEQ ID NO: 415 | HUMAN PROTEIN SEQUENCE |
| hR6-054 | SEQ ID NO: 416 | HUMAN mRNA SEQUENCE |
| hP6-054 | SEQ ID NO: 417 | HUMAN PROTEIN SEQUENCE |
| hR6-054 | SEQ ID NO: 418 | HUMAN mRNA SEQUENCE |
| hP6-054 | SEQ ID NO: 419 | HUMAN PROTEIN SEQUENCE |
| hR6-054 | SEQ ID NO: 420 | HUMAN mRNA SEQUENCE |
| hP6-054 | SEQ ID NO: 421 | HUMAN PROTEIN SEQUENCE |
| mD6-064 | SEQ ID NO: 422 | MOUSE GENOMIC SEQUENCE |
| mR6-064 | SEQ ID NO: 423 | MOUSE mRNA SEQUENCE |
| mP6-064 | SEQ ID NO: 424 | MOUSE PROTEIN SEQUENCE |
| mR6-064 | SEQ ID NO: 425 | MOUSE mRNA SEQUENCE |
| mP6-064 | SEQ ID NO: 426 | MOUSE PROTEIN SEQUENCE |
| hD6-064 | SEQ ID NO: 427 | HUMAN GENOMIC SEQUENCE |
| hR6-064 | SEQ ID NO: 428 | HUMAN mRNA SEQUENCE |
| hP6-064 | SEQ ID NO: 429 | HUMAN PROTEIN SEQUENCE |
| hR6-064 | SEQ ID NO: 430 | HUMAN mRNA SEQUENCE |
| hP6-064 | SEQ ID NO: 431 | HUMAN PROTEIN SEQUENCE |
| hR6-064 | SEQ ID NO: 432 | HUMAN mRNA SEQUENCE |
| hP6-064 | SEQ ID NO: 433 | HUMAN PROTEIN SEQUENCE |
| hR6-064 | SEQ ID NO: 434 | HUMAN mRNA SEQUENCE |
| hP6-064 | SEQ ID NO: 435 | HUMAN PROTEIN SEQUENCE |
| hR6-064 | SEQ ID NO: 436 | HUMAN mRNA SEQUENCE |
| hP6-064 | SEQ ID NO: 437 | HUMAN PROTEIN SEQUENCE |
| hR6-064 | SEQ ID NO: 438 | HUMAN mRNA SEQUENCE |
| hP6-064 | SEQ ID NO: 439 | HUMAN PROTEIN SEQUENCE |
| hR6-064 | SEQ ID NO: 440 | HUMAN mRNA SEQUENCE |
| hP6-064 | SEQ ID NO: 441 | HUMAN PROTEIN SEQUENCE |
| hR6-064 | SEQ ID NO: 442 | HUMAN mRNA SEQUENCE |
| hP6-064 | SEQ ID NO: 443 | HUMAN PROTEIN SEQUENCE |
| hR6-064 | SEQ ID NO: 444 | HUMAN mRNA SEQUENCE |
| hP6-064 | SEQ ID NO: 445 | HUMAN PROTEIN SEQUENCE |
| mD6-087 | SEQ ID NO: 446 | MOUSE GENOMIC SEQUENCE |
| mR6-087 | SEQ ID NO: 447 | MOUSE mRNA SEQUENCE |
| mP6-087 | SEQ ID NO: 448 | MOUSE PROTEIN SEQUENCE |
| hD6-087 | SEQ ID NO: 449 | HUMAN GENOMIC SEQUENCE |
| hR6-087 | SEQ ID NO: 450 | HUMAN mRNA SEQUENCE |
| hP6-087 | SEQ ID NO: 451 | HUMAN PROTEIN SEQUENCE |
| mD6-099 | SEQ ID NO: 452 | MOUSE GENOMIC SEQUENCE |
| mR6-099 | SEQ ID NO: 453 | MOUSE mRNA SEQUENCE |
| mP6-099 | SEQ ID NO: 454 | MOUSE PROTEIN SEQUENCE |
| hD6-099 | SEQ ID NO: 455 | HUMAN GENOMIC SEQUENCE |
| hR6-099 | SEQ ID NO: 456 | HUMAN mRNA SEQUENCE |
| hP6-099 | SEQ ID NO: 457 | HUMAN PROTEIN SEQUENCE |
| hR6-099 | SEQ ID NO: 458 | HUMAN mRNA SEQUENCE |
| hP6-099 | SEQ ID NO: 459 | HUMAN PROTEIN SEQUENCE |
| mD6-105 | SEQ ID NO: 460 | MOUSE GENOMIC SEQUENCE |
| mR6-105 | SEQ ID NO: 461 | MOUSE mRNA SEQUENCE |
| mP6-105 | SEQ ID NO: 462 | MOUSE PROTEIN SEQUENCE |
| hD6-105 | SEQ ID NO: 463 | HUMAN GENOMIC SEQUENCE |
| hR6-105 | SEQ ID NO: 464 | HUMAN mRNA SEQUENCE |
| hP6-105 | SEQ ID NO: 465 | HUMAN PROTEIN SEQUENCE |
| hR6-105 | SEQ ID NO: 466 | HUMAN mRNA SEQUENCE |
| hP6-105 | SEQ ID NO: 467 | HUMAN PROTEIN SEQUENCE |
| hR6-105 | SEQ ID NO: 468 | HUMAN mRNA SEQUENCE |
| hP6-105 | SEQ ID NO: 469 | HUMAN PROTEIN SEQUENCE |
| mD6-112 | SEQ ID NO: 470 | MOUSE GENOMIC SEQUENCE |
| mR6-112 | SEQ ID NO: 471 | MOUSE mRNA SEQUENCE |
| mP6-112 | SEQ ID NO: 472 | MOUSE PROTEIN SEQUENCE |
| hD6-112 | SEQ ID NO: 473 | HUMAN GENOMIC SEQUENCE |
| hR6-112 | SEQ ID NO: 474 | HUMAN mRNA SEQUENCE |
| hP6-112 | SEQ ID NO: 475 | HUMAN PROTEIN SEQUENCE |
| hR6-112 | SEQ ID NO: 476 | HUMAN mRNA SEQUENCE |
| hP6-112 | SEQ ID NO: 477 | HUMAN PROTEIN SEQUENCE |
| mD6-115 | SEQ ID NO: 478 | MOUSE GENOMIC SEQUENCE |
| mR6-115 | SEQ ID NO: 479 | MOUSE mRNA SEQUENCE |
| mP6-115 | SEQ ID NO: 480 | MOUSE PROTEIN SEQUENCE |
| hD6-115 | SEQ ID NO: 481 | HUMAN GENOMIC SEQUENCE |
| hR6-115 | SEQ ID NO: 482 | HUMAN mRNA SEQUENCE |
| hP6-115 | SEQ ID NO: 483 | HUMAN PROTEIN SEQUENCE |
| hR6-115 | SEQ ID NO: 484 | HUMAN mRNA SEQUENCE |
| hP6-115 | SEQ ID NO: 485 | HUMAN PROTEIN SEQUENCE |
| hR6-115 | SEQ ID NO: 486 | HUMAN mRNA SEQUENCE |
| hP6-115 | SEQ ID NO: 487 | HUMAN PROTEIN SEQUENCE |
| mD6-131 | SEQ ID NO: 488 | MOUSE GENOMIC SEQUENCE |
| mR6-131 | SEQ ID NO: 489 | MOUSE mRNA SEQUENCE |
| mP6-131 | SEQ ID NO: 490 | MOUSE PROTEIN SEQUENCE |
| hD6-131 | SEQ ID NO: 491 | HUMAN GENOMIC SEQUENCE |
| hR6-131 | SEQ ID NO: 492 | HUMAN mRNA SEQUENCE |
| hP6-131 | SEQ ID NO: 493 | HUMAN PROTEIN SEQUENCE |
| hR6-131 | SEQ ID NO: 494 | HUMAN mRNA SEQUENCE |
| hP6-131 | SEQ ID NO: 495 | HUMAN PROTEIN SEQUENCE |
| mD6-154 | SEQ ID NO: 496 | MOUSE GENOMIC SEQUENCE |
| mR6-154 | SEQ ID NO: 497 | MOUSE mRNA SEQUENCE |
| mP6-154 | SEQ ID NO: 498 | MOUSE PROTEIN SEQUENCE |
| hD6-154 | SEQ ID NO: 499 | HUMAN GENOMIC SEQUENCE |
| hR6-154 | SEQ ID NO: 500 | HUMAN mRNA SEQUENCE |
| hP6-154 | SEQ ID NO: 501 | HUMAN PROTEIN SEQUENCE |
| mD6-157 | SEQ ID NO: 502 | MOUSE GENOMIC SEQUENCE |
| mR6-157 | SEQ ID NO: 503 | MOUSE mRNA SEQUENCE |
| mP6-157 | SEQ ID NO: 504 | MOUSE PROTEIN SEQUENCE |
| mR6-157 | SEQ ID NO: 505 | MOUSE mRNA SEQUENCE |
| mP6-157 | SEQ ID NO: 506 | MOUSE PROTEIN SEQUENCE |
| hD6-157 | SEQ ID NO: 507 | HUMAN GENOMIC SEQUENCE |
| hR6-157 | SEQ ID NO: 508 | HUMAN mRNA SEQUENCE |
| hP6-157 | SEQ ID NO: 509 | HUMAN PROTEIN SEQUENCE |
| hR6-157 | SEQ ID NO: 510 | HUMAN mRNA SEQUENCE |
| hP6-157 | SEQ ID NO: 511 | HUMAN PROTEIN SEQUENCE |
| mD6-164 | SEQ ID NO: 512 | MOUSE GENOMIC SEQUENCE |
| mR6-164 | SEQ ID NO: 513 | MOUSE mRNA SEQUENCE |
| mP6-164 | SEQ ID NO: 514 | MOUSE PROTEIN SEQUENCE |
| hD6-164 | SEQ ID NO: 515 | HUMAN GENOMIC SEQUENCE |
| hR6-164 | SEQ ID NO: 516 | HUMAN mRNA SEQUENCE |
| hP6-164 | SEQ ID NO: 517 | HUMAN PROTEIN SEQUENCE |
| mD6-169 | SEQ ID NO: 518 | MOUSE GENOMIC SEQUENCE |
| mR6-169 | SEQ ID NO: 519 | MOUSE mRNA SEQUENCE |
| mP6-169 | SEQ ID NO: 520 | MOUSE PROTEIN SEQUENCE |
| hD6-169 | SEQ ID NO: 521 | HUMAN GENOMIC SEQUENCE |
| hR6-169 | SEQ ID NO: 522 | HUMAN mRNA SEQUENCE |
| hP6-169 | SEQ ID NO: 523 | HUMAN PROTEIN SEQUENCE |
| mD6-170 | SEQ ID NO: 524 | MOUSE GENOMIC SEQUENCE |
| mR6-170 | SEQ ID NO: 525 | MOUSE mRNA SEQUENCE |
| mP6-170 | SEQ ID NO: 526 | MOUSE PROTEIN SEQUENCE |
| hD6-170 | SEQ ID NO: 527 | HUMAN GENOMIC SEQUENCE |
| hR6-170 | SEQ ID NO: 528 | HUMAN mRNA SEQUENCE |
| hP6-170 | SEQ ID NO: 529 | HUMAN PROTEIN SEQUENCE |
| hR6-170 | SEQ ID NO: 530 | HUMAN mRNA SEQUENCE |
| hP6-170 | SEQ ID NO: 531 | HUMAN PROTEIN SEQUENCE |
| hR6-170 | SEQ ID NO: 532 | HUMAN mRNA SEQUENCE |
| hP6-170 | SEQ ID NO: 533 | HUMAN PROTEIN SEQUENCE |
| hR6-170 | SEQ ID NO: 534 | HUMAN mRNA SEQUENCE |
| hP6-170 | SEQ ID NO: 535 | HUMAN PROTEIN SEQUENCE |
| hR6-170 | SEQ ID NO: 536 | HUMAN mRNA SEQUENCE |
| hP6-170 | SEQ ID NO: 537 | HUMAN PROTEIN SEQUENCE |
| mD6-178 | SEQ ID NO: 538 | MOUSE GENOMIC SEQUENCE |
| mR6-178 | SEQ ID NO: 539 | MOUSE mRNA SEQUENCE |
| mP6-178 | SEQ ID NO: 540 | MOUSE PROTEIN SEQUENCE |
| hD6-178 | SEQ ID NO: 541 | HUMAN GENOMIC SEQUENCE |
| hR6-178 | SEQ ID NO: 542 | HUMAN mRNA SEQUENCE |
| hP6-178 | SEQ ID NO: 543 | HUMAN PROTEIN SEQUENCE |
| mD6-180 | SEQ ID NO: 544 | MOUSE GENOMIC SEQUENCE |
| mR6-180 | SEQ ID NO: 545 | MOUSE mRNA SEQUENCE |
| mP6-180 | SEQ ID NO: 546 | MOUSE PROTEIN SEQUENCE |
| hD6-180 | SEQ ID NO: 547 | HUMAN GENOMIC SEQUENCE |
| hR6-180 | SEQ ID NO: 548 | HUMAN mRNA SEQUENCE |
| hP6-180 | SEQ ID NO: 549 | HUMAN PROTEIN SEQUENCE |
| hR6-180 | SEQ ID NO: 550 | HUMAN mRNA SEQUENCE |
| hP6-180 | SEQ ID NO: 551 | HUMAN PROTEIN SEQUENCE |
| mD6-184 | SEQ ID NO: 552 | MOUSE GENOMIC SEQUENCE |
| mR6-184 | SEQ ID NO: 553 | MOUSE mRNA SEQUENCE |
| mP6-184 | SEQ ID NO: 554 | MOUSE PROTEIN SEQUENCE |
| hD6-184 | SEQ ID NO: 555 | HUMAN GENOMIC SEQUENCE |
| hR6-184 | SEQ ID NO: 556 | HUMAN mRNA SEQUENCE |
| hP6-184 | SEQ ID NO: 557 | HUMAN PROTEIN SEQUENCE |
| hR6-184 | SEQ ID NO: 558 | HUMAN mRNA SEQUENCE |
| hP6-184 | SEQ ID NO: 559 | HUMAN PROTEIN SEQUENCE |
| mD6-189 | SEQ ID NO: 560 | MOUSE GENOMIC SEQUENCE |
| mR6-189 | SEQ ID NO: 561 | MOUSE mRNA SEQUENCE |
| mP6-189 | SEQ ID NO: 562 | MOUSE PROTEIN SEQUENCE |
| hD6-189 | SEQ ID NO: 563 | HUMAN GENOMIC SEQUENCE |
| hR6-189 | SEQ ID NO: 564 | HUMAN mRNA SEQUENCE |
| hP6-189 | SEQ ID NO: 565 | HUMAN PROTEIN SEQUENCE |
| hR6-189 | SEQ ID NO: 566 | HUMAN mRNA SEQUENCE |
| hP6-189 | SEQ ID NO: 567 | HUMAN PROTEIN SEQUENCE |
| hR6-189 | SEQ ID NO: 568 | HUMAN mRNA SEQUENCE |
| hP6-189 | SEQ ID NO: 569 | HUMAN PROTEIN SEQUENCE |
| hR6-189 | SEQ ID NO: 570 | HUMAN mRNA SEQUENCE |
| hP6-189 | SEQ ID NO: 571 | HUMAN PROTEIN SEQUENCE |
| hR6-189 | SEQ ID NO: 572 | HUMAN mRNA SEQUENCE |
| hP6-189 | SEQ ID NO: 573 | HUMAN PROTEIN SEQUENCE |
| hR6-189 | SEQ ID NO: 574 | HUMAN mRNA SEQUENCE |
| hP6-189 | SEQ ID NO: 575 | HUMAN PROTEIN SEQUENCE |
| hR6-189 | SEQ ID NO: 576 | HUMAN mRNA SEQUENCE |
| hP6-189 | SEQ ID NO: 577 | HUMAN PROTEIN SEQUENCE |
| hR6-189 | SEQ ID NO: 578 | HUMAN mRNA SEQUENCE |
| hP6-189 | SEQ ID NO: 579 | HUMAN PROTEIN SEQUENCE |
| hR6-189 | SEQ ID NO: 580 | HUMAN mRNA SEQUENCE |
| hP6-189 | SEQ ID NO: 581 | HUMAN PROTEIN SEQUENCE |
| hR6-189 | SEQ ID NO: 582 | HUMAN mRNA SEQUENCE |
| hP6-189 | SEQ ID NO: 583 | HUMAN PROTEIN SEQUENCE |
| hR6-189 | SEQ ID NO: 584 | HUMAN mRNA SEQUENCE |
| hP6-189 | SEQ ID NO: 585 | HUMAN PROTEIN SEQUENCE |
| hR6-189 | SEQ ID NO: 586 | HUMAN mRNA SEQUENCE |
| hP6-189 | SEQ ID NO: 587 | HUMAN PROTEIN SEQUENCE |
| hR6-189 | SEQ ID NO: 588 | HUMAN mRNA SEQUENCE |
| hP6-189 | SEQ ID NO: 589 | HUMAN PROTEIN SEQUENCE |
| hR6-189 | SEQ ID NO: 590 | HUMAN mRNA SEQUENCE |
| hP6-189 | SEQ ID NO: 591 | HUMAN PROTEIN SEQUENCE |
| hR6-189 | SEQ ID NO: 592 | HUMAN mRNA SEQUENCE |
| hP6-189 | SEQ ID NO: 593 | HUMAN PROTEIN SEQUENCE |
| hR6-189 | SEQ ID NO: 594 | HUMAN mRNA SEQUENCE |
| hP6-189 | SEQ ID NO: 595 | HUMAN PROTEIN SEQUENCE |
| hR6-189 | SEQ ID NO: 596 | HUMAN mRNA SEQUENCE |
| hP6-189 | SEQ ID NO: 597 | HUMAN PROTEIN SEQUENCE |
| hR6-189 | SEQ ID NO: 598 | HUMAN mRNA SEQUENCE |
| hP6-189 | SEQ ID NO: 599 | HUMAN PROTEIN SEQUENCE |
| hR6-189 | SEQ ID NO: 600 | HUMAN mRNA SEQUENCE |
| hP6-189 | SEQ ID NO: 601 | HUMAN PROTEIN SEQUENCE |
| hR6-189 | SEQ ID NO: 602 | HUMAN mRNA SEQUENCE |
| hP6-189 | SEQ ID NO: 603 | HUMAN PROTEIN SEQUENCE |
| hR6-189 | SEQ ID NO: 604 | HUMAN mRNA SEQUENCE |
| hP6-189 | SEQ ID NO: 605 | HUMAN PROTEIN SEQUENCE |
| hR6-189 | SEQ ID NO: 606 | HUMAN mRNA SEQUENCE |
| hP6-189 | SEQ ID NO: 607 | HUMAN PROTEIN SEQUENCE |
| hR6-189 | SEQ ID NO: 608 | HUMAN mRNA SEQUENCE |
| hP6-189 | SEQ ID NO: 609 | HUMAN PROTEIN SEQUENCE |
| hR6-189 | SEQ ID NO: 610 | HUMAN mRNA SEQUENCE |
| hP6-189 | SEQ ID NO: 611 | HUMAN PROTEIN SEQUENCE |
| hR6-189 | SEQ ID NO: 612 | HUMAN mRNA SEQUENCE |
| hP6-189 | SEQ ID NO: 613 | HUMAN PROTEIN SEQUENCE |
| hR6-189 | SEQ ID NO: 614 | HUMAN mRNA SEQUENCE |
| hP6-189 | SEQ ID NO: 615 | HUMAN PROTEIN SEQUENCE |
| hR6-189 | SEQ ID NO: 616 | HUMAN mRNA SEQUENCE |
| hP6-189 | SEQ ID NO: 617 | HUMAN PROTEIN SEQUENCE |
| hR6-189 | SEQ ID NO: 618 | HUMAN mRNA SEQUENCE |
| hP6-189 | SEQ ID NO: 619 | HUMAN PROTEIN SEQUENCE |
| hR6-189 | SEQ ID NO: 620 | HUMAN mRNA SEQUENCE |
| hP6-189 | SEQ ID NO: 621 | HUMAN PROTEIN SEQUENCE |
| hR6-189 | SEQ ID NO: 622 | HUMAN mRNA SEQUENCE |
| hP6-189 | SEQ ID NO: 623 | HUMAN PROTEIN SEQUENCE |
| hR6-189 | SEQ ID NO: 624 | HUMAN mRNA SEQUENCE |
| hP6-189 | SEQ ID NO: 625 | HUMAN PROTEIN SEQUENCE |
| hR6-189 | SEQ ID NO: 626 | HUMAN mRNA SEQUENCE |
| hP6-189 | SEQ ID NO: 627 | HUMAN PROTEIN SEQUENCE |
| hR6-189 | SEQ ID NO: 628 | HUMAN mRNA SEQUENCE |
| hP6-189 | SEQ ID NO: 629 | HUMAN PROTEIN SEQUENCE |
| hR6-189 | SEQ ID NO: 630 | HUMAN mRNA SEQUENCE |
| hP6-189 | SEQ ID NO: 631 | HUMAN PROTEIN SEQUENCE |
| hR6-189 | SEQ ID NO: 632 | HUMAN mRNA SEQUENCE |
| hP6-189 | SEQ ID NO: 633 | HUMAN PROTEIN SEQUENCE |
| hR6-189 | SEQ ID NO: 634 | HUMAN mRNA SEQUENCE |
| hP6-189 | SEQ ID NO: 635 | HUMAN PROTEIN SEQUENCE |
| mD6-196 | SEQ ID NO: 636 | MOUSE GENOMIC SEQUENCE |
| mR6-196 | SEQ ID NO: 637 | MOUSE mRNA SEQUENCE |
| mP6-196 | SEQ ID NO: 638 | MOUSE PROTEIN SEQUENCE |
| mR6-196 | SEQ ID NO: 639 | MOUSE mRNA SEQUENCE |
| mP6-196 | SEQ ID NO: 640 | MOUSE PROTEIN SEQUENCE |
| mR6-196 | SEQ ID NO: 641 | MOUSE mRNA SEQUENCE |
| mP6-196 | SEQ ID NO: 642 | MOUSE PROTEIN SEQUENCE |
| hD6-196 | SEQ ID NO: 643 | HUMAN GENOMIC SEQUENCE |
| hR6-196 | SEQ ID NO: 644 | HUMAN mRNA SEQUENCE |
| hP6-196 | SEQ ID NO: 645 | HUMAN PROTEIN SEQUENCE |
| hR6-196 | SEQ ID NO: 646 | HUMAN mRNA SEQUENCE |
| hP6-196 | SEQ ID NO: 647 | HUMAN PROTEIN SEQUENCE |
| mD6-222 | SEQ ID NO: 648 | MOUSE GENOMIC SEQUENCE |
| mR6-222 | SEQ ID NO: 649 | MOUSE mRNA SEQUENCE |
| mP6-222 | SEQ ID NO: 650 | MOUSE PROTEIN SEQUENCE |
| hD6-222 | SEQ ID NO: 651 | HUMAN GENOMIC SEQUENCE |
| hR6-222 | SEQ ID NO: 652 | HUMAN mRNA SEQUENCE |
| hP6-222 | SEQ ID NO: 653 | HUMAN PROTEIN SEQUENCE |
| hR6-222 | SEQ ID NO: 654 | HUMAN mRNA SEQUENCE |
| hP6-222 | SEQ ID NO: 655 | HUMAN PROTEIN SEQUENCE |
| mD6-223 | SEQ ID NO: 656 | MOUSE GENOMIC SEQUENCE |
| mR6-223 | SEQ ID NO: 657 | MOUSE mRNA SEQUENCE |
| mP6-223 | SEQ ID NO: 658 | MOUSE PROTEIN SEQUENCE |
| hD6-223 | SEQ ID NO: 659 | HUMAN GENOMIC SEQUENCE |
| hR6-223 | SEQ ID NO: 660 | HUMAN mRNA SEQUENCE |
| hP6-223 | SEQ ID NO: 661 | HUMAN PROTEIN SEQUENCE |
| hR6-223 | SEQ ID NO: 662 | HUMAN mRNA SEQUENCE |
| hP6-223 | SEQ ID NO: 663 | HUMAN PROTEIN SEQUENCE |
| hR6-223 | SEQ ID NO: 664 | HUMAN mRNA SEQUENCE |
| hP6-223 | SEQ ID NO: 665 | HUMAN PROTEIN SEQUENCE |
| mD6-233 | SEQ ID NO: 666 | MOUSE GENOMIC SEQUENCE |
| mR6-233 | SEQ ID NO: 667 | MOUSE mRNA SEQUENCE |
| mP6-233 | SEQ ID NO: 668 | MOUSE PROTEIN SEQUENCE |
| hD6-233 | SEQ ID NO: 669 | HUMAN GENOMIC SEQUENCE |
| hR6-233 | SEQ ID NO: 670 | HUMAN mRNA SEQUENCE |
| hP6-233 | SEQ ID NO: 671 | HUMAN PROTEIN SEQUENCE |
| hR6-233 | SEQ ID NO: 672 | HUMAN mRNA SEQUENCE |
| hP6-233 | SEQ ID NO: 673 | HUMAN PROTEIN SEQUENCE |
| hR6-233 | SEQ ID NO: 674 | HUMAN mRNA SEQUENCE |
| hP6-233 | SEQ ID NO: 675 | HUMAN PROTEIN SEQUENCE |
| hR6-233 | SEQ ID NO: 676 | HUMAN mRNA SEQUENCE |
| hP6-233 | SEQ ID NO: 677 | HUMAN PROTEIN SEQUENCE |
| mD6-234 | SEQ ID NO: 678 | MOUSE GENOMIC SEQUENCE |
| mR6-234 | SEQ ID NO: 679 | MOUSE mRNA SEQUENCE |
| mP6-234 | SEQ ID NO: 680 | MOUSE PROTEIN SEQUENCE |
| hD6-234 | SEQ ID NO: 681 | HUMAN GENOMIC SEQUENCE |
| hR6-234 | SEQ ID NO: 682 | HUMAN mRNA SEQUENCE |
| hP6-234 | SEQ ID NO: 683 | HUMAN PROTEIN SEQUENCE |
| hR6-234 | SEQ ID NO: 684 | HUMAN mRNA SEQUENCE |
| hP6-234 | SEQ ID NO: 685 | HUMAN PROTEIN SEQUENCE |
| hR6-234 | SEQ ID NO: 686 | HUMAN mRNA SEQUENCE |
| hP6-234 | SEQ ID NO: 687 | HUMAN PROTEIN SEQUENCE |
| hR6-234 | SEQ ID NO: 688 | HUMAN mRNA SEQUENCE |
| hP6-234 | SEQ ID NO: 689 | HUMAN PROTEIN SEQUENCE |
| hR6-234 | SEQ ID NO: 690 | HUMAN mRNA SEQUENCE |
| hP6-234 | SEQ ID NO: 691 | HUMAN PROTEIN SEQUENCE |
| hR6-234 | SEQ ID NO: 692 | HUMAN mRNA SEQUENCE |
| hP6-234 | SEQ ID NO: 693 | HUMAN PROTEIN SEQUENCE |
| hR6-234 | SEQ ID NO: 694 | HUMAN mRNA SEQUENCE |
| hP6-234 | SEQ ID NO: 695 | HUMAN PROTEIN SEQUENCE |
| hR6-234 | SEQ ID NO: 696 | HUMAN mRNA SEQUENCE |
| hP6-234 | SEQ ID NO: 697 | HUMAN PROTEIN SEQUENCE |
| hR6-234 | SEQ ID NO: 698 | HUMAN mRNA SEQUENCE |
| hP6-234 | SEQ ID NO: 699 | HUMAN PROTEIN SEQUENCE |
| hR6-234 | SEQ ID NO: 700 | HUMAN mRNA SEQUENCE |
| hP6-234 | SEQ ID NO: 701 | HUMAN PROTEIN SEQUENCE |
| hR6-234 | SEQ ID NO: 702 | HUMAN mRNA SEQUENCE |
| hP6-234 | SEQ ID NO: 703 | HUMAN PROTEIN SEQUENCE |
| hR6-234 | SEQ ID NO: 704 | HUMAN mRNA SEQUENCE |
| hP6-234 | SEQ ID NO: 705 | HUMAN PROTEIN SEQUENCE |
| hR6-234 | SEQ ID NO: 706 | HUMAN mRNA SEQUENCE |
| hP6-234 | SEQ ID NO: 707 | HUMAN PROTEIN SEQUENCE |
| hR6-234 | SEQ ID NO: 708 | HUMAN mRNA SEQUENCE |
| hP6-234 | SEQ ID NO: 709 | HUMAN PROTEIN SEQUENCE |
| hR6-234 | SEQ ID NO: 710 | HUMAN mRNA SEQUENCE |
| hP6-234 | SEQ ID NO: 711 | HUMAN PROTEIN SEQUENCE |
| mD6-240 | SEQ ID NO: 712 | MOUSE GENOMIC SEQUENCE |
| mR6-240 | SEQ ID NO: 713 | MOUSE mRNA SEQUENCE |
| mP6-240 | SEQ ID NO: 714 | MOUSE PROTEIN SEQUENCE |
| hD6-240 | SEQ ID NO: 715 | HUMAN GENOMIC SEQUENCE |
| hR6-240 | SEQ ID NO: 716 | HUMAN mRNA SEQUENCE |
| hP6-240 | SEQ ID NO: 717 | HUMAN PROTEIN SEQUENCE |
| hR6-240 | SEQ ID NO: 718 | HUMAN mRNA SEQUENCE |
| hP6-240 | SEQ ID NO: 719 | HUMAN PROTEIN SEQUENCE |
| mD6-243 | SEQ ID NO: 720 | MOUSE GENOMIC SEQUENCE |
| mR6-243 | SEQ ID NO: 721 | MOUSE mRNA SEQUENCE |
| mP6-243 | SEQ ID NO: 722 | MOUSE PROTEIN SEQUENCE |
| hD6-243 | SEQ ID NO: 723 | HUMAN GENOMIC SEQUENCE |
| hR6-243 | SEQ ID NO: 724 | HUMAN mRNA SEQUENCE |
| hP6-243 | SEQ ID NO: 725 | HUMAN PROTEIN SEQUENCE |
| hR6-243 | SEQ ID NO: 726 | HUMAN mRNA SEQUENCE |
| hP6-243 | SEQ ID NO: 727 | HUMAN PROTEIN SEQUENCE |
| hR6-243 | SEQ ID NO: 728 | HUMAN mRNA SEQUENCE |
| hP6-243 | SEQ ID NO: 729 | HUMAN PROTEIN SEQUENCE |
| hR6-243 | SEQ ID NO: 730 | HUMAN mRNA SEQUENCE |
| hP6-243 | SEQ ID NO: 731 | HUMAN PROTEIN SEQUENCE |
| hR6-243 | SEQ ID NO: 732 | HUMAN mRNA SEQUENCE |
| hP6-243 | SEQ ID NO: 733 | HUMAN PROTEIN SEQUENCE |
| hR6-243 | SEQ ID NO: 734 | HUMAN mRNA SEQUENCE |
| hP6-243 | SEQ ID NO: 735 | HUMAN PROTEIN SEQUENCE |
| hR6-243 | SEQ ID NO: 736 | HUMAN mRNA SEQUENCE |
| hP6-243 | SEQ ID NO: 737 | HUMAN PROTEIN SEQUENCE |
| mD6-244 | SEQ ID NO: 738 | MOUSE GENOMIC SEQUENCE |
| mR6-244 | SEQ ID NO: 739 | MOUSE mRNA SEQUENCE |
| mP6-244 | SEQ ID NO: 740 | MOUSE PROTEIN SEQUENCE |
| mR6-244 | SEQ ID NO: 741 | MOUSE mRNA SEQUENCE |
| mP6-244 | SEQ ID NO: 742 | MOUSE PROTEIN SEQUENCE |
| hD6-244 | SEQ ID NO: 743 | HUMAN GENOMIC SEQUENCE |
| hR6-244 | SEQ ID NO: 744 | HUMAN mRNA SEQUENCE |
| hP6-244 | SEQ ID NO: 745 | HUMAN PROTEIN SEQUENCE |
| mD6-248 | SEQ ID NO: 746 | MOUSE GENOMIC SEQUENCE |
| mR6-248 | SEQ ID NO: 747 | MOUSE mRNA SEQUENCE |
| mP6-248 | SEQ ID NO: 748 | MOUSE PROTEIN SEQUENCE |
| hD6-248 | SEQ ID NO: 749 | HUMAN GENOMIC SEQUENCE |
| hR6-248 | SEQ ID NO: 750 | HUMAN mRNA SEQUENCE |
| hP6-248 | SEQ ID NO: 751 | HUMAN PROTEIN SEQUENCE |
| hR6-248 | SEQ ID NO: 752 | HUMAN mRNA SEQUENCE |
| hP6-248 | SEQ ID NO: 753 | HUMAN PROTEIN SEQUENCE |
| hR6-248 | SEQ ID NO: 754 | HUMAN mRNA SEQUENCE |
| hP6-248 | SEQ ID NO: 755 | HUMAN PROTEIN SEQUENCE |
| mD6-261 | SEQ ID NO: 756 | MOUSE GENOMIC SEQUENCE |
| mR6-261 | SEQ ID NO: 757 | MOUSE mRNA SEQUENCE |
| mP6-261 | SEQ ID NO: 758 | MOUSE PROTEIN SEQUENCE |
| hD6-261 | SEQ ID NO: 759 | HUMAN GENOMIC SEQUENCE |
| hR6-261 | SEQ ID NO: 760 | HUMAN mRNA SEQUENCE |
| hP6-261 | SEQ ID NO: 761 | HUMAN PROTEIN SEQUENCE |
| mD6-277 | SEQ ID NO: 762 | MOUSE GENOMIC SEQUENCE |
| mR6-277 | SEQ ID NO: 763 | MOUSE mRNA SEQUENCE |
| mP6-277 | SEQ ID NO: 764 | MOUSE PROTEIN SEQUENCE |
| mR6-277 | SEQ ID NO: 765 | MOUSE mRNA SEQUENCE |
| mP6-277 | SEQ ID NO: 766 | MOUSE PROTEIN SEQUENCE |
| mR6-277 | SEQ ID NO: 767 | MOUSE mRNA SEQUENCE |
| mP6-277 | SEQ ID NO: 768 | MOUSE PROTEIN SEQUENCE |
| mR6-277 | SEQ ID NO: 769 | MOUSE mRNA SEQUENCE |
| mP6-277 | SEQ ID NO: 770 | MOUSE PROTEIN SEQUENCE |
| mR6-277 | SEQ ID NO: 771 | MOUSE mRNA SEQUENCE |
| mP6-277 | SEQ ID NO: 772 | MOUSE PROTEIN SEQUENCE |
| mR6-277 | SEQ ID NO: 773 | MOUSE mRNA SEQUENCE |
| mP6-277 | SEQ ID NO: 774 | MOUSE PROTEIN SEQUENCE |
| hD6-277 | SEQ ID NO: 775 | HUMAN GENOMIC SEQUENCE |
| hR6-277 | SEQ ID NO: 776 | HUMAN mRNA SEQUENCE |
| hP6-277 | SEQ ID NO: 777 | HUMAN PROTEIN SEQUENCE |
| hR6-277 | SEQ ID NO: 778 | HUMAN mRNA SEQUENCE |
| hP6-277 | SEQ ID NO: 779 | HUMAN PROTEIN SEQUENCE |
| hR6-277 | SEQ ID NO: 780 | HUMAN mRNA SEQUENCE |
| hP6-277 | SEQ ID NO: 781 | HUMAN PROTEIN SEQUENCE |
| hR6-277 | SEQ ID NO: 782 | HUMAN mRNA SEQUENCE |
| hP6-277 | SEQ ID NO: 783 | HUMAN PROTEIN SEQUENCE |
| mD6-282 | SEQ ID NO: 784 | MOUSE GENOMIC SEQUENCE |
| mR6-282 | SEQ ID NO: 785 | MOUSE mRNA SEQUENCE |
| mP6-282 | SEQ ID NO: 786 | MOUSE PROTEIN SEQUENCE |
| hD6-282 | SEQ ID NO: 787 | HUMAN GENOMIC SEQUENCE |
| hR6-282 | SEQ ID NO: 788 | HUMAN mRNA SEQUENCE |
| hP6-282 | SEQ ID NO: 789 | HUMAN PROTEIN SEQUENCE |
| mD6-297 | SEQ ID NO: 790 | MOUSE GENOMIC SEQUENCE |
| mR6-297 | SEQ ID NO: 791 | MOUSE mRNA SEQUENCE |
| mP6-297 | SEQ ID NO: 792 | MOUSE PROTEIN SEQUENCE |
| hD6-297 | SEQ ID NO: 793 | HUMAN GENOMIC SEQUENCE |
| hR6-297 | SEQ ID NO: 794 | HUMAN mRNA SEQUENCE |
| hP6-297 | SEQ ID NO: 795 | HUMAN PROTEIN SEQUENCE |
| hR6-297 | SEQ ID NO: 796 | HUMAN mRNA SEQUENCE |
| hP6-297 | SEQ ID NO: 797 | HUMAN PROTEIN SEQUENCE |
| hR6-297 | SEQ ID NO: 798 | HUMAN mRNA SEQUENCE |
| hP6-297 | SEQ ID NO: 799 | HUMAN PROTEIN SEQUENCE |
| hR6-297 | SEQ ID NO: 800 | HUMAN mRNA SEQUENCE |
| hP6-297 | SEQ ID NO: 801 | HUMAN PROTEIN SEQUENCE |
| mD6-302 | SEQ ID NO: 802 | MOUSE GENOMIC SEQUENCE |
| mR6-302 | SEQ ID NO: 803 | MOUSE mRNA SEQUENCE |
| mP6-302 | SEQ ID NO: 804 | MOUSE PROTEIN SEQUENCE |
| hD6-302 | SEQ ID NO: 805 | HUMAN GENOMIC SEQUENCE |
| hR6-302 | SEQ ID NO: 806 | HUMAN mRNA SEQUENCE |
| hP6-302 | SEQ ID NO: 807 | HUMAN PROTEIN SEQUENCE |
| mD6-308 | SEQ ID NO: 808 | MOUSE GENOMIC SEQUENCE |
| mR6-308 | SEQ ID NO: 809 | MOUSE mRNA SEQUENCE |
| mP6-308 | SEQ ID NO: 810 | MOUSE PROTEIN SEQUENCE |
| hD6-308 | SEQ ID NO: 811 | HUMAN GENOMIC SEQUENCE |
| hR6-308 | SEQ ID NO: 812 | HUMAN mRNA SEQUENCE |
| hP6-308 | SEQ ID NO: 813 | HUMAN PROTEIN SEQUENCE |
| mD6-309 | SEQ ID NO: 814 | MOUSE GENOMIC SEQUENCE |
| mR6-309 | SEQ ID NO: 815 | MOUSE mRNA SEQUENCE |
| mP6-309 | SEQ ID NO: 816 | MOUSE PROTEIN SEQUENCE |
| hD6-309 | SEQ ID NO: 817 | HUMAN GENOMIC SEQUENCE |
| hR6-309 | SEQ ID NO: 818 | HUMAN mRNA SEQUENCE |
| hP6-309 | SEQ ID NO: 819 | HUMAN PROTEIN SEQUENCE |
| mD6-324 | SEQ ID NO: 820 | MOUSE GENOMIC SEQUENCE |
| mR6-324 | SEQ ID NO: 821 | MOUSE mRNA SEQUENCE |
| mP6-324 | SEQ ID NO: 822 | MOUSE PROTEIN SEQUENCE |
| hD6-324 | SEQ ID NO: 823 | HUMAN GENOMIC SEQUENCE |
| hR6-324 | SEQ ID NO: 824 | HUMAN mRNA SEQUENCE |
| hP6-324 | SEQ ID NO: 825 | HUMAN PROTEIN SEQUENCE |
| hR6-324 | SEQ ID NO: 826 | HUMAN mRNA SEQUENCE |
| hP6-324 | SEQ ID NO: 827 | HUMAN PROTEIN SEQUENCE |
| hR6-324 | SEQ ID NO: 828 | HUMAN mRNA SEQUENCE |
| hP6-324 | SEQ ID NO: 829 | HUMAN PROTEIN SEQUENCE |
| mD6-337 | SEQ ID NO: 830 | MOUSE GENOMIC SEQUENCE |
| mR6-337 | SEQ ID NO: 831 | MOUSE mRNA SEQUENCE |
| mP6-337 | SEQ ID NO: 832 | MOUSE PROTEIN SEQUENCE |
| hD6-337 | SEQ ID NO: 833 | HUMAN GENOMIC SEQUENCE |
| hR6-337 | SEQ ID NO: 834 | HUMAN mRNA SEQUENCE |
| hP6-337 | SEQ ID NO: 835 | HUMAN PROTEIN SEQUENCE |
| mD7-011 | SEQ ID NO: 836 | MOUSE GENOMIC SEQUENCE |
| mR7-011 | SEQ ID NO: 837 | MOUSE mRNA SEQUENCE |
| mP7-011 | SEQ ID NO: 838 | MOUSE PROTEIN SEQUENCE |
| hD7-011 | SEQ ID NO: 839 | HUMAN GENOMIC SEQUENCE |
| hR7-011 | SEQ ID NO: 840 | HUMAN mRNA SEQUENCE |
| hP7-011 | SEQ ID NO: 841 | HUMAN PROTEIN SEQUENCE |
| hR7-011 | SEQ ID NO: 842 | HUMAN mRNA SEQUENCE |
| hP7-011 | SEQ ID NO: 843 | HUMAN PROTEIN SEQUENCE |
| hR7-011 | SEQ ID NO: 844 | HUMAN mRNA SEQUENCE |
| hP7-011 | SEQ ID NO: 845 | HUMAN PROTEIN SEQUENCE |
| hR7-011 | SEQ ID NO: 846 | HUMAN mRNA SEQUENCE |
| hP7-011 | SEQ ID NO: 847 | HUMAN PROTEIN SEQUENCE |
| mD7-012 | SEQ ID NO: 848 | MOUSE GENOMIC SEQUENCE |
| mR7-012 | SEQ ID NO: 849 | MOUSE mRNA SEQUENCE |
| mP7-012 | SEQ ID NO: 850 | MOUSE PROTEIN SEQUENCE |
| hD7-012 | SEQ ID NO: 851 | HUMAN GENOMIC SEQUENCE |
| hR7-012 | SEQ ID NO: 852 | HUMAN mRNA SEQUENCE |
| hP7-012 | SEQ ID NO: 853 | HUMAN PROTEIN SEQUENCE |
| hR7-012 | SEQ ID NO: 854 | HUMAN mRNA SEQUENCE |
| hP7-012 | SEQ ID NO: 855 | HUMAN PROTEIN SEQUENCE |
| hR7-012 | SEQ ID NO: 856 | HUMAN mRNA SEQUENCE |
| hP7-012 | SEQ ID NO: 857 | HUMAN PROTEIN SEQUENCE |
| mD7-039 | SEQ ID NO: 858 | MOUSE GENOMIC SEQUENCE |
| mR7-039 | SEQ ID NO: 859 | MOUSE mRNA SEQUENCE |
| mP7-039 | SEQ ID NO: 860 | MOUSE PROTEIN SEQUENCE |
| hD7-039 | SEQ ID NO: 861 | HUMAN GENOMIC SEQUENCE |
| hR7-039 | SEQ ID NO: 862 | HUMAN mRNA SEQUENCE |
| hP7-039 | SEQ ID NO: 863 | HUMAN PROTEIN SEQUENCE |
| hR7-039 | SEQ ID NO: 864 | HUMAN mRNA SEQUENCE |
| hP7-039 | SEQ ID NO: 865 | HUMAN PROTEIN SEQUENCE |
| hR7-039 | SEQ ID NO: 866 | HUMAN mRNA SEQUENCE |
| hP7-039 | SEQ ID NO: 867 | HUMAN PROTEIN SEQUENCE |
| mD7-044 | SEQ ID NO: 868 | MOUSE GENOMIC SEQUENCE |
| mR7-044 | SEQ ID NO: 869 | MOUSE mRNA SEQUENCE |
| mP7-044 | SEQ ID NO: 870 | MOUSE PROTEIN SEQUENCE |
| hD7-044 | SEQ ID NO: 871 | HUMAN GENOMIC SEQUENCE |
| hR7-044 | SEQ ID NO: 872 | HUMAN mRNA SEQUENCE |
| hP7-044 | SEQ ID NO: 873 | HUMAN PROTEIN SEQUENCE |
| hR7-044 | SEQ ID NO: 874 | HUMAN mRNA SEQUENCE |
| hP7-044 | SEQ ID NO: 875 | HUMAN PROTEIN SEQUENCE |
| mD7-046 | SEQ ID NO: 876 | MOUSE GENOMIC SEQUENCE |
| mR7-046 | SEQ ID NO: 877 | MOUSE mRNA SEQUENCE |
| mP7-046 | SEQ ID NO: 878 | MOUSE PROTEIN SEQUENCE |
| hD7-046 | SEQ ID NO: 879 | HUMAN GENOMIC SEQUENCE |
| hR7-046 | SEQ ID NO: 880 | HUMAN mRNA SEQUENCE |
| hP7-046 | SEQ ID NO: 881 | HUMAN PROTEIN SEQUENCE |
| hR7-046 | SEQ ID NO: 882 | HUMAN mRNA SEQUENCE |
| hP7-046 | SEQ ID NO: 883 | HUMAN PROTEIN SEQUENCE |
| hR7-046 | SEQ ID NO: 884 | HUMAN mRNA SEQUENCE |
| hP7-046 | SEQ ID NO: 885 | HUMAN PROTEIN SEQUENCE |
| hR7-046 | SEQ ID NO: 886 | HUMAN mRNA SEQUENCE |
| hP7-046 | SEQ ID NO: 887 | HUMAN PROTEIN SEQUENCE |
| hR7-046 | SEQ ID NO: 888 | HUMAN mRNA SEQUENCE |
| hP7-046 | SEQ ID NO: 889 | HUMAN PROTEIN SEQUENCE |
| hR7-046 | SEQ ID NO: 890 | HUMAN mRNA SEQUENCE |
| hP7-046 | SEQ ID NO: 891 | HUMAN PROTEIN SEQUENCE |
| hR7-046 | SEQ ID NO: 892 | HUMAN mRNA SEQUENCE |
| hP7-046 | SEQ ID NO: 893 | HUMAN PROTEIN SEQUENCE |
| hR7-046 | SEQ ID NO: 894 | HUMAN mRNA SEQUENCE |
| hP7-046 | SEQ ID NO: 895 | HUMAN PROTEIN SEQUENCE |
| mD7-052 | SEQ ID NO: 896 | MOUSE GENOMIC SEQUENCE |
| mR7-052 | SEQ ID NO: 897 | MOUSE mRNA SEQUENCE |
| mP7-052 | SEQ ID NO: 898 | MOUSE PROTEIN SEQUENCE |
| hD7-052 | SEQ ID NO: 899 | HUMAN GENOMIC SEQUENCE |
| hR7-052 | SEQ ID NO: 900 | HUMAN mRNA SEQUENCE |
| hP7-052 | SEQ ID NO: 901 | HUMAN PROTEIN SEQUENCE |
| hR7-052 | SEQ ID NO: 902 | HUMAN mRNA SEQUENCE |
| hP7-052 | SEQ ID NO: 903 | HUMAN PROTEIN SEQUENCE |
| mD7-058 | SEQ ID NO: 904 | MOUSE GENOMIC SEQUENCE |
| mR7-058 | SEQ ID NO: 905 | MOUSE mRNA SEQUENCE |
| mP7-058 | SEQ ID NO: 906 | MOUSE PROTEIN SEQUENCE |
| mR7-058 | SEQ ID NO: 907 | MOUSE mRNA SEQUENCE |
| mP7-058 | SEQ ID NO: 908 | MOUSE PROTEIN SEQUENCE |
| hD7-058 | SEQ ID NO: 909 | HUMAN GENOMIC SEQUENCE |
| hR7-058 | SEQ ID NO: 910 | HUMAN mRNA SEQUENCE |
| hP7-058 | SEQ ID NO: 911 | HUMAN PROTEIN SEQUENCE |
| hR7-058 | SEQ ID NO: 912 | HUMAN mRNA SEQUENCE |
| hP7-058 | SEQ ID NO: 913 | HUMAN PROTEIN SEQUENCE |
| mD7-061 | SEQ ID NO: 914 | MOUSE GENOMIC SEQUENCE |
| mR7-061 | SEQ ID NO: 915 | MOUSE mRNA SEQUENCE |
| mP7-061 | SEQ ID NO: 916 | MOUSE PROTEIN SEQUENCE |
| hD7-061 | SEQ ID NO: 917 | HUMAN GENOMIC SEQUENCE |
| hR7-061 | SEQ ID NO: 918 | HUMAN mRNA SEQUENCE |
| hP7-061 | SEQ ID NO: 919 | HUMAN PROTEIN SEQUENCE |
| hR7-061 | SEQ ID NO: 920 | HUMAN mRNA SEQUENCE |
| hP7-061 | SEQ ID NO: 921 | HUMAN PROTEIN SEQUENCE |
| hR7-061 | SEQ ID NO: 922 | HUMAN mRNA SEQUENCE |
| hP7-061 | SEQ ID NO: 923 | HUMAN PROTEIN SEQUENCE |
| mD7-062 | SEQ ID NO: 924 | MOUSE GENOMIC SEQUENCE |
| mR7-062 | SEQ ID NO: 925 | MOUSE mRNA SEQUENCE |
| mP7-062 | SEQ ID NO: 926 | MOUSE PROTEIN SEQUENCE |
| mD7-062 | SEQ ID NO: 927 | MOUSE GENOMIC SEQUENCE |
| mR7-062 | SEQ ID NO: 928 | MOUSE mRNA SEQUENCE |
| mP7-062 | SEQ ID NO: 929 | MOUSE PROTEIN SEQUENCE |
| hD7-062 | SEQ ID NO: 930 | HUMAN GENOMIC SEQUENCE |
| hR7-062 | SEQ ID NO: 931 | HUMAN mRNA SEQUENCE |
| hP7-062 | SEQ ID NO: 932 | HUMAN PROTEIN SEQUENCE |
| hR7-062 | SEQ ID NO: 933 | HUMAN mRNA SEQUENCE |
| hP7-062 | SEQ ID NO: 934 | HUMAN PROTEIN SEQUENCE |
| mD11-031 | SEQ ID NO: 935 | MOUSE GENOMIC SEQUENCE |
| mR11-031 | SEQ ID NO: 936 | MOUSE mRNA SEQUENCE |
| mP11-031 | SEQ ID NO: 937 | MOUSE PROTEIN SEQUENCE |
| hD11-031 | SEQ ID NO: 938 | HUMAN GENOMIC SEQUENCE |
| hR11-031 | SEQ ID NO: 939 | HUMAN mRNA SEQUENCE |
| hP11-031 | SEQ ID NO: 940 | HUMAN PROTEIN SEQUENCE |
| hR11-031 | SEQ ID NO: 941 | HUMAN mRNA SEQUENCE |
| hP11-031 | SEQ ID NO: 942 | HUMAN PROTEIN SEQUENCE |
| hR11-031 | SEQ ID NO: 943 | HUMAN mRNA SEQUENCE |
| hP11-031 | SEQ ID NO: 944 | HUMAN PROTEIN SEQUENCE |
| hR11-031 | SEQ ID NO: 945 | HUMAN mRNA SEQUENCE |
| hP11-031 | SEQ ID NO: 946 | HUMAN PROTEIN SEQUENCE |
| mD7-085 | SEQ ID NO: 947 | MOUSE GENOMIC SEQUENCE |
| mR7-085 | SEQ ID NO: 948 | MOUSE mRNA SEQUENCE |
| mP7-085 | SEQ ID NO: 949 | MOUSE PROTEIN SEQUENCE |
| hD7-085 | SEQ ID NO: 950 | HUMAN GENOMIC SEQUENCE |
| hR7-085 | SEQ ID NO: 951 | HUMAN mRNA SEQUENCE |
| hP7-085 | SEQ ID NO: 952 | HUMAN PROTEIN SEQUENCE |
| hR7-085 | SEQ ID NO: 953 | HUMAN mRNA SEQUENCE |
| hP7-085 | SEQ ID NO: 954 | HUMAN PROTEIN SEQUENCE |
| hR7-085 | SEQ ID NO: 955 | HUMAN mRNA SEQUENCE |
| hP7-085 | SEQ ID NO: 956 | HUMAN PROTEIN SEQUENCE |
| hR7-085 | SEQ ID NO: 957 | HUMAN mRNA SEQUENCE |
| hP7-085 | SEQ ID NO: 958 | HUMAN PROTEIN SEQUENCE |
| hR7-085 | SEQ ID NO: 959 | HUMAN mRNA SEQUENCE |
| hP7-085 | SEQ ID NO: 960 | HUMAN PROTEIN SEQUENCE |
| hR7-085 | SEQ ID NO: 961 | HUMAN mRNA SEQUENCE |
| hP7-085 | SEQ ID NO: 962 | HUMAN PROTEIN SEQUENCE |
| mD7-096 | SEQ ID NO: 963 | MOUSE GENOMIC SEQUENCE |
| mR7-096 | SEQ ID NO: 964 | MOUSE mRNA SEQUENCE |
| mP7-096 | SEQ ID NO: 965 | MOUSE PROTEIN SEQUENCE |
| hD7-096 | SEQ ID NO: 966 | HUMAN GENOMIC SEQUENCE |
| hR7-096 | SEQ ID NO: 967 | HUMAN mRNA SEQUENCE |
| hP7-096 | SEQ ID NO: 968 | HUMAN PROTEIN SEQUENCE |
| hR7-096 | SEQ ID NO: 969 | HUMAN mRNA SEQUENCE |
| hP7-096 | SEQ ID NO: 970 | HUMAN PROTEIN SEQUENCE |
| mD7-104 | SEQ ID NO: 971 | MOUSE GENOMIC SEQUENCE |
| mR7-104 | SEQ ID NO: 972 | MOUSE mRNA SEQUENCE |
| mP7-104 | SEQ ID NO: 973 | MOUSE PROTEIN SEQUENCE |
| mR7-104 | SEQ ID NO: 974 | MOUSE mRNA SEQUENCE |
| mP7-104 | SEQ ID NO: 975 | MOUSE PROTEIN SEQUENCE |
| hD7-104 | SEQ ID NO: 976 | HUMAN GENOMIC SEQUENCE |
| hR7-104 | SEQ ID NO: 977 | HUMAN mRNA SEQUENCE |
| hP7-104 | SEQ ID NO: 978 | HUMAN PROTEIN SEQUENCE |
| hR7-104 | SEQ ID NO: 979 | HUMAN mRNA SEQUENCE |
| hP7-104 | SEQ ID NO: 980 | HUMAN PROTEIN SEQUENCE |
| hR7-104 | SEQ ID NO: 981 | HUMAN mRNA SEQUENCE |
| hP7-104 | SEQ ID NO: 982 | HUMAN PROTEIN SEQUENCE |
| hR7-104 | SEQ ID NO: 983 | HUMAN mRNA SEQUENCE |
| hP7-104 | SEQ ID NO: 984 | HUMAN PROTEIN SEQUENCE |
| hR7-104 | SEQ ID NO: 985 | HUMAN mRNA SEQUENCE |
| hP7-104 | SEQ ID NO: 986 | HUMAN PROTEIN SEQUENCE |
| mD7-120 | SEQ ID NO: 987 | MOUSE GENOMIC SEQUENCE |
| mR7-120 | SEQ ID NO: 988 | MOUSE mRNA SEQUENCE |
| mP7-120 | SEQ ID NO: 989 | MOUSE PROTEIN SEQUENCE |
| hD7-120 | SEQ ID NO: 990 | HUMAN GENOMIC SEQUENCE |
| hR7-120 | SEQ ID NO: 991 | HUMAN mRNA SEQUENCE |
| hP7-120 | SEQ ID NO: 992 | HUMAN PROTEIN SEQUENCE |
| hR7-120 | SEQ ID NO: 993 | HUMAN mRNA SEQUENCE |
| hP7-120 | SEQ ID NO: 994 | HUMAN PROTEIN SEQUENCE |
| hR7-120 | SEQ ID NO: 995 | HUMAN mRNA SEQUENCE |
| hP7-120 | SEQ ID NO: 996 | HUMAN PROTEIN SEQUENCE |
| hR7-120 | SEQ ID NO: 997 | HUMAN mRNA SEQUENCE |
| hP7-120 | SEQ ID NO: 998 | HUMAN PROTEIN SEQUENCE |
| mD7-121 | SEQ ID NO: 999 | MOUSE GENOMIC SEQUENCE |
| mR7-121 | SEQ ID NO: 1000 | MOUSE mRNA SEQUENCE |
| mP7-121 | SEQ ID NO: 1001 | MOUSE PROTEIN SEQUENCE |
| hD7-121 | SEQ ID NO: 1002 | HUMAN GENOMIC SEQUENCE |
| hR7-121 | SEQ ID NO: 1003 | HUMAN mRNA SEQUENCE |
| hP7-121 | SEQ ID NO: 1004 | HUMAN PROTEIN SEQUENCE |
| hR7-121 | SEQ ID NO: 1005 | HUMAN mRNA SEQUENCE |
| hP7-121 | SEQ ID NO: 1006 | HUMAN PROTEIN SEQUENCE |
| mD7-133 | SEQ ID NO: 1007 | MOUSE GENOMIC SEQUENCE |
| mR7-133 | SEQ ID NO: 1008 | MOUSE mRNA SEQUENCE |
| mP7-133 | SEQ ID NO: 1009 | MOUSE PROTEIN SEQUENCE |
| mR7-133 | SEQ ID NO: 1010 | MOUSE mRNA SEQUENCE |
| mP7-133 | SEQ ID NO: 1011 | MOUSE PROTEIN SEQUENCE |
| mR7-133 | SEQ ID NO: 1012 | MOUSE mRNA SEQUENCE |
| mP7-133 | SEQ ID NO: 1013 | MOUSE PROTEIN SEQUENCE |
| mR7-133 | SEQ ID NO: 1014 | MOUSE mRNA SEQUENCE |
| mP7-133 | SEQ ID NO: 1015 | MOUSE PROTEIN SEQUENCE |
| hD7-133 | SEQ ID NO: 1016 | HUMAN GENOMIC SEQUENCE |
| hR7-133 | SEQ ID NO: 1017 | HUMAN mRNA SEQUENCE |
| hP7-133 | SEQ ID NO: 1018 | HUMAN PROTEIN SEQUENCE |
| mD7-140 | SEQ ID NO: 1019 | MOUSE GENOMIC SEQUENCE |
| mR7-140 | SEQ ID NO: 1020 | MOUSE mRNA SEQUENCE |
| mP7-140 | SEQ ID NO: 1021 | MOUSE PROTEIN SEQUENCE |
| mR7-140 | SEQ ID NO: 1022 | MOUSE mRNA SEQUENCE |
| mP7-140 | SEQ ID NO: 1023 | MOUSE PROTEIN SEQUENCE |
| hD7-140 | SEQ ID NO: 1024 | HUMAN GENOMIC SEQUENCE |
| hR7-140 | SEQ ID NO: 1025 | HUMAN mRNA SEQUENCE |
| hP7-140 | SEQ ID NO: 1026 | HUMAN PROTEIN SEQUENCE |
| hR7-140 | SEQ ID NO: 1027 | HUMAN mRNA SEQUENCE |
| hP7-140 | SEQ ID NO: 1028 | HUMAN PROTEIN SEQUENCE |
| hR7-140 | SEQ ID NO: 1029 | HUMAN mRNA SEQUENCE |
| hP7-140 | SEQ ID NO: 1030 | HUMAN PROTEIN SEQUENCE |
| hR7-140 | SEQ ID NO: 1031 | HUMAN mRNA SEQUENCE |
| hP7-140 | SEQ ID NO: 1032 | HUMAN PROTEIN SEQUENCE |
| hR7-140 | SEQ ID NO: 1033 | HUMAN mRNA SEQUENCE |
| hP7-140 | SEQ ID NO: 1034 | HUMAN PROTEIN SEQUENCE |
| hR7-140 | SEQ ID NO: 1035 | HUMAN mRNA SEQUENCE |
| hP7-140 | SEQ ID NO: 1036 | HUMAN PROTEIN SEQUENCE |
| mD7-144 | SEQ ID NO: 1037 | MOUSE GENOMIC SEQUENCE |
| mR7-144 | SEQ ID NO: 1038 | MOUSE mRNA SEQUENCE |
| mP7-144 | SEQ ID NO: 1039 | MOUSE PROTEIN SEQUENCE |
| hD7-144 | SEQ ID NO: 1040 | HUMAN GENOMIC SEQUENCE |
| hR7-144 | SEQ ID NO: 1041 | HUMAN mRNA SEQUENCE |
| hP7-144 | SEQ ID NO: 1042 | HUMAN PROTEIN SEQUENCE |
| mD7-151 | SEQ ID NO: 1043 | MOUSE GENOMIC SEQUENCE |
| mR7-151 | SEQ ID NO: 1044 | MOUSE mRNA SEQUENCE |
| mP7-151 | SEQ ID NO: 1045 | MOUSE PROTEIN SEQUENCE |
| hD7-151 | SEQ ID NO: 1046 | HUMAN GENOMIC SEQUENCE |
| hR7-151 | SEQ ID NO: 1047 | HUMAN mRNA SEQUENCE |
| hP7-151 | SEQ ID NO: 1048 | HUMAN PROTEIN SEQUENCE |
| hR7-151 | SEQ ID NO: 1049 | HUMAN mRNA SEQUENCE |
| hP7-151 | SEQ ID NO: 1050 | HUMAN PROTEIN SEQUENCE |
| mD7-157 | SEQ ID NO: 1051 | MOUSE GENOMIC SEQUENCE |
| mR7-157 | SEQ ID NO: 1052 | MOUSE mRNA SEQUENCE |
| mP7-157 | SEQ ID NO: 1053 | MOUSE PROTEIN SEQUENCE |
| hD7-157 | SEQ ID NO: 1054 | HUMAN GENOMIC SEQUENCE |
| hR7-157 | SEQ ID NO: 1055 | HUMAN mRNA SEQUENCE |
| hP7-157 | SEQ ID NO: 1056 | HUMAN PROTEIN SEQUENCE |
| hR7-157 | SEQ ID NO: 1057 | HUMAN mRNA SEQUENCE |
| hP7-157 | SEQ ID NO: 1058 | HUMAN PROTEIN SEQUENCE |
| hR7-157 | SEQ ID NO: 1059 | HUMAN mRNA SEQUENCE |
| hP7-157 | SEQ ID NO: 1060 | HUMAN PROTEIN SEQUENCE |
| hR7-157 | SEQ ID NO: 1061 | HUMAN mRNA SEQUENCE |
| hP7-157 | SEQ ID NO: 1062 | HUMAN PROTEIN SEQUENCE |
| hR7-157 | SEQ ID NO: 1063 | HUMAN mRNA SEQUENCE |
| hP7-157 | SEQ ID NO: 1064 | HUMAN PROTEIN SEQUENCE |
| mD7-161 | SEQ ID NO: 1065 | MOUSE GENOMIC SEQUENCE |
| mR7-161 | SEQ ID NO: 1066 | MOUSE mRNA SEQUENCE |
| mP7-161 | SEQ ID NO: 1067 | MOUSE PROTEIN SEQUENCE |
| hD7-161 | SEQ ID NO: 1068 | HUMAN GENOMIC SEQUENCE |
| hR7-161 | SEQ ID NO: 1069 | HUMAN mRNA SEQUENCE |
| hP7-161 | SEQ ID NO: 1070 | HUMAN PROTEIN SEQUENCE |
| hR7-161 | SEQ ID NO: 1071 | HUMAN mRNA SEQUENCE |
| hP7-161 | SEQ ID NO: 1072 | HUMAN PROTEIN SEQUENCE |
| hR7-161 | SEQ ID NO: 1073 | HUMAN mRNA SEQUENCE |
| hP7-161 | SEQ ID NO: 1074 | HUMAN PROTEIN SEQUENCE |
| hR7-161 | SEQ ID NO: 1075 | HUMAN mRNA SEQUENCE |
| hP7-161 | SEQ ID NO: 1076 | HUMAN PROTEIN SEQUENCE |
| hR7-161 | SEQ ID NO: 1077 | HUMAN mRNA SEQUENCE |
| hP7-161 | SEQ ID NO: 1078 | HUMAN PROTEIN SEQUENCE |
| mD7-165 | SEQ ID NO: 1079 | MOUSE GENOMIC SEQUENCE |
| mR7-165 | SEQ ID NO: 1080 | MOUSE mRNA SEQUENCE |
| mP7-165 | SEQ ID NO: 1081 | MOUSE PROTEIN SEQUENCE |
| hD7-165 | SEQ ID NO: 1082 | HUMAN GENOMIC SEQUENCE |
| hR7-165 | SEQ ID NO: 1083 | HUMAN mRNA SEQUENCE |
| hP7-165 | SEQ ID NO: 1084 | HUMAN PROTEIN SEQUENCE |
| mD7-166 | SEQ ID NO: 1085 | MOUSE GENOMIC SEQUENCE |
| mR7-166 | SEQ ID NO: 1086 | MOUSE mRNA SEQUENCE |
| mP7-166 | SEQ ID NO: 1087 | MOUSE PROTEIN SEQUENCE |
| hD7-166 | SEQ ID NO: 1088 | HUMAN GENOMIC SEQUENCE |
| hR7-166 | SEQ ID NO: 1089 | HUMAN mRNA SEQUENCE |
| hP7-166 | SEQ ID NO: 1090 | HUMAN PROTEIN SEQUENCE |
| hR7-166 | SEQ ID NO: 1091 | HUMAN mRNA SEQUENCE |
| hP7-166 | SEQ ID NO: 1092 | HUMAN PROTEIN SEQUENCE |
| hR7-166 | SEQ ID NO: 1093 | HUMAN mRNA SEQUENCE |
| hP7-166 | SEQ ID NO: 1094 | HUMAN PROTEIN SEQUENCE |
| mD7-171 | SEQ ID NO: 1095 | MOUSE GENOMIC SEQUENCE |
| mR7-171 | SEQ ID NO: 1096 | MOUSE mRNA SEQUENCE |
| mP7-171 | SEQ ID NO: 1097 | MOUSE PROTEIN SEQUENCE |
| mR7-171 | SEQ ID NO: 1098 | MOUSE mRNA SEQUENCE |
| mP7-171 | SEQ ID NO: 1099 | MOUSE PROTEIN SEQUENCE |
| mR7-171 | SEQ ID NO: 1100 | MOUSE mRNA SEQUENCE |
| mP7-171 | SEQ ID NO: 1101 | MOUSE PROTEIN SEQUENCE |
| hD7-171 | SEQ ID NO: 1102 | HUMAN GENOMIC SEQUENCE |
| hR7-171 | SEQ ID NO: 1103 | HUMAN mRNA SEQUENCE |
| hP7-171 | SEQ ID NO: 1104 | HUMAN PROTEIN SEQUENCE |
| hR7-171 | SEQ ID NO: 1105 | HUMAN mRNA SEQUENCE |
| hP7-171 | SEQ ID NO: 1106 | HUMAN PROTEIN SEQUENCE |
| mD7-172 | SEQ ID NO: 1107 | MOUSE GENOMIC SEQUENCE |
| mR7-172 | SEQ ID NO: 1108 | MOUSE mRNA SEQUENCE |
| mP7-172 | SEQ ID NO: 1109 | MOUSE PROTEIN SEQUENCE |
| mR7-172 | SEQ ID NO: 1110 | MOUSE mRNA SEQUENCE |
| mP7-172 | SEQ ID NO: 1111 | MOUSE PROTEIN SEQUENCE |
| hD7-172 | SEQ ID NO: 1112 | HUMAN GENOMIC SEQUENCE |
| hR7-172 | SEQ ID NO: 1113 | HUMAN mRNA SEQUENCE |
| hP7-172 | SEQ ID NO: 1114 | HUMAN PROTEIN SEQUENCE |
| hR7-172 | SEQ ID NO: 1115 | HUMAN mRNA SEQUENCE |
| hP7-172 | SEQ ID NO: 1116 | HUMAN PROTEIN SEQUENCE |
| hR7-172 | SEQ ID NO: 1117 | HUMAN mRNA SEQUENCE |
| hP7-172 | SEQ ID NO: 1118 | HUMAN PROTEIN SEQUENCE |
| mD7-178 | SEQ ID NO: 1119 | MOUSE GENOMIC SEQUENCE |
| mR7-178 | SEQ ID NO: 1120 | MOUSE mRNA SEQUENCE |
| mP7-178 | SEQ ID NO: 1121 | MOUSE PROTEIN SEQUENCE |
| hD7-178 | SEQ ID NO: 1122 | HUMAN GENOMIC SEQUENCE |
| hR7-178 | SEQ ID NO: 1123 | HUMAN mRNA SEQUENCE |
| hP7-178 | SEQ ID NO: 1124 | HUMAN PROTEIN SEQUENCE |
| hR7-178 | SEQ ID NO: 1125 | HUMAN mRNA SEQUENCE |
| hP7-178 | SEQ ID NO: 1126 | HUMAN PROTEIN SEQUENCE |
| mD7-183 | SEQ ID NO: 1127 | MOUSE GENOMIC SEQUENCE |
| mR7-183 | SEQ ID NO: 1128 | MOUSE mRNA SEQUENCE |
| mP7-183 | SEQ ID NO: 1129 | MOUSE PROTEIN SEQUENCE |
| hD7-183 | SEQ ID NO: 1130 | HUMAN GENOMIC SEQUENCE |
| hR7-183 | SEQ ID NO: 1131 | HUMAN mRNA SEQUENCE |
| hP7-183 | SEQ ID NO: 1132 | HUMAN PROTEIN SEQUENCE |
| hR7-183 | SEQ ID NO: 1133 | HUMAN mRNA SEQUENCE |
| hP7-183 | SEQ ID NO: 1134 | HUMAN PROTEIN SEQUENCE |
| hR7-183 | SEQ ID NO: 1135 | HUMAN mRNA SEQUENCE |
| hP7-183 | SEQ ID NO: 1136 | HUMAN PROTEIN SEQUENCE |
| mD8-003 | SEQ ID NO: 1137 | MOUSE GENOMIC SEQUENCE |
| mR8-003 | SEQ ID NO: 1138 | MOUSE mRNA SEQUENCE |
| mP8-003 | SEQ ID NO: 1139 | MOUSE PROTEIN SEQUENCE |
| hD8-003 | SEQ ID NO: 1140 | HUMAN GENOMIC SEQUENCE |
| hR8-003 | SEQ ID NO: 1141 | HUMAN mRNA SEQUENCE |
| hP8-003 | SEQ ID NO: 1142 | HUMAN PROTEIN SEQUENCE |
| hR8-003 | SEQ ID NO: 1143 | HUMAN mRNA SEQUENCE |
| hP8-003 | SEQ ID NO: 1144 | HUMAN PROTEIN SEQUENCE |
| hR8-003 | SEQ ID NO: 1145 | HUMAN mRNA SEQUENCE |
| hP8-003 | SEQ ID NO: 1146 | HUMAN PROTEIN SEQUENCE |
| hR8-003 | SEQ ID NO: 1147 | HUMAN mRNA SEQUENCE |
| hP8-003 | SEQ ID NO: 1148 | HUMAN PROTEIN SEQUENCE |
| hR8-003 | SEQ ID NO: 1149 | HUMAN mRNA SEQUENCE |
| hP8-003 | SEQ ID NO: 1150 | HUMAN PROTEIN SEQUENCE |
| hD8-003 | SEQ ID NO: 1151 | HUMAN GENOMIC SEQUENCE |
| hR8-003 | SEQ ID NO: 1152 | HUMAN mRNA SEQUENCE |
| hP8-003 | SEQ ID NO: 1153 | HUMAN PROTEIN SEQUENCE |
| hR8-003 | SEQ ID NO: 1154 | HUMAN mRNA SEQUENCE |
| hP8-003 | SEQ ID NO: 1155 | HUMAN PROTEIN SEQUENCE |
| hR8-003 | SEQ ID NO: 1156 | HUMAN mRNA SEQUENCE |
| hP8-003 | SEQ ID NO: 1157 | HUMAN PROTEIN SEQUENCE |
| hR8-003 | SEQ ID NO: 1158 | HUMAN mRNA SEQUENCE |
| hP8-003 | SEQ ID NO: 1159 | HUMAN PROTEIN SEQUENCE |
| hR8-003 | SEQ ID NO: 1160 | HUMAN mRNA SEQUENCE |
| hP8-003 | SEQ ID NO: 1161 | HUMAN PROTEIN SEQUENCE |
| mD8-017 | SEQ ID NO: 1162 | MOUSE GENOMIC SEQUENCE |
| mR8-017 | SEQ ID NO: 1163 | MOUSE mRNA SEQUENCE |
| mP8-017 | SEQ ID NO: 1164 | MOUSE PROTEIN SEQUENCE |
| hD8-017 | SEQ ID NO: 1165 | HUMAN GENOMIC SEQUENCE |
| hR8-017 | SEQ ID NO: 1166 | HUMAN mRNA SEQUENCE |
| hP8-017 | SEQ ID NO: 1167 | HUMAN PROTEIN SEQUENCE |
| hR8-017 | SEQ ID NO: 1168 | HUMAN mRNA SEQUENCE |
| hP8-017 | SEQ ID NO: 1169 | HUMAN PROTEIN SEQUENCE |
| hR8-017 | SEQ ID NO: 1170 | HUMAN mRNA SEQUENCE |
| hP8-017 | SEQ ID NO: 1171 | HUMAN PROTEIN SEQUENCE |
| mD8-020 | SEQ ID NO: 1172 | MOUSE GENOMIC SEQUENCE |
| mR8-020 | SEQ ID NO: 1173 | MOUSE mRNA SEQUENCE |
| mP8-020 | SEQ ID NO: 1174 | MOUSE PROTEIN SEQUENCE |
| hD8-020 | SEQ ID NO: 1175 | HUMAN GENOMIC SEQUENCE |
| hR8-020 | SEQ ID NO: 1176 | HUMAN mRNA SEQUENCE |
| hP8-020 | SEQ ID NO: 1177 | HUMAN PROTEIN SEQUENCE |
| hR8-020 | SEQ ID NO: 1178 | HUMAN mRNA SEQUENCE |
| hP8-020 | SEQ ID NO: 1179 | HUMAN PROTEIN SEQUENCE |
| hR8-020 | SEQ ID NO: 1180 | HUMAN mRNA SEQUENCE |
| hP8-020 | SEQ ID NO: 1181 | HUMAN PROTEIN SEQUENCE |
| mD8-034 | SEQ ID NO: 1182 | MOUSE GENOMIC SEQUENCE |
| mR8-034 | SEQ ID NO: 1183 | MOUSE mRNA SEQUENCE |
| mP8-034 | SEQ ID NO: 1184 | MOUSE PROTEIN SEQUENCE |
| hD8-034 | SEQ ID NO: 1185 | HUMAN GENOMIC SEQUENCE |
| hR8-034 | SEQ ID NO: 1186 | HUMAN mRNA SEQUENCE |
| hP8-034 | SEQ ID NO: 1187 | HUMAN PROTEIN SEQUENCE |
| hR8-034 | SEQ ID NO: 1188 | HUMAN mRNA SEQUENCE |
| hP8-034 | SEQ ID NO: 1189 | HUMAN PROTEIN SEQUENCE |
| mD8-050 | SEQ ID NO: 1190 | MOUSE GENOMIC SEQUENCE |
| mR8-050 | SEQ ID NO: 1191 | MOUSE mRNA SEQUENCE |
| mP8-050 | SEQ ID NO: 1192 | MOUSE PROTEIN SEQUENCE |
| hD8-050 | SEQ ID NO: 1193 | HUMAN GENOMIC SEQUENCE |
| hR8-050 | SEQ ID NO: 1194 | HUMAN mRNA SEQUENCE |
| hP8-050 | SEQ ID NO: 1195 | HUMAN PROTEIN SEQUENCE |
| hR8-050 | SEQ ID NO: 1196 | HUMAN mRNA SEQUENCE |
| hP8-050 | SEQ ID NO: 1197 | HUMAN PROTEIN SEQUENCE |
| hR8-050 | SEQ ID NO: 1198 | HUMAN mRNA SEQUENCE |
| hP8-050 | SEQ ID NO: 1199 | HUMAN PROTEIN SEQUENCE |
| hR8-050 | SEQ ID NO: 1200 | HUMAN mRNA SEQUENCE |
| hP8-050 | SEQ ID NO: 1201 | HUMAN PROTEIN SEQUENCE |
| mD8-052 | SEQ ID NO: 1202 | MOUSE GENOMIC SEQUENCE |
| mR8-052 | SEQ ID NO: 1203 | MOUSE mRNA SEQUENCE |
| mP8-052 | SEQ ID NO: 1204 | MOUSE PROTEIN SEQUENCE |
| hD8-052 | SEQ ID NO: 1205 | HUMAN GENOMIC SEQUENCE |
| hR8-052 | SEQ ID NO: 1206 | HUMAN mRNA SEQUENCE |
| hP8-052 | SEQ ID NO: 1207 | HUMAN PROTEIN SEQUENCE |
| mD9-004 | SEQ ID NO: 1208 | MOUSE GENOMIC SEQUENCE |
| mR9-004 | SEQ ID NO: 1209 | MOUSE mRNA SEQUENCE |
| mP9-004 | SEQ ID NO: 1210 | MOUSE PROTEIN SEQUENCE |
| hD9-004 | SEQ ID NO: 1211 | HUMAN GENOMIC SEQUENCE |
| hR9-004 | SEQ ID NO: 1212 | HUMAN mRNA SEQUENCE |
| hP9-004 | SEQ ID NO: 1213 | HUMAN PROTEIN SEQUENCE |
| hR9-004 | SEQ ID NO: 1214 | HUMAN mRNA SEQUENCE |
| hP9-004 | SEQ ID NO: 1215 | HUMAN PROTEIN SEQUENCE |
| hR9-004 | SEQ ID NO: 1216 | HUMAN mRNA SEQUENCE |
| hP9-004 | SEQ ID NO: 1217 | HUMAN PROTEIN SEQUENCE |
| hR9-004 | SEQ ID NO: 1218 | HUMAN mRNA SEQUENCE |
| hP9-004 | SEQ ID NO: 1219 | HUMAN PROTEIN SEQUENCE |
| hR9-004 | SEQ ID NO: 1220 | HUMAN mRNA SEQUENCE |
| hP9-004 | SEQ ID NO: 1221 | HUMAN PROTEIN SEQUENCE |
| hR9-004 | SEQ ID NO: 1222 | HUMAN mRNA SEQUENCE |
| hP9-004 | SEQ ID NO: 1223 | HUMAN PROTEIN SEQUENCE |
| hR9-004 | SEQ ID NO: 1224 | HUMAN mRNA SEQUENCE |
| hP9-004 | SEQ ID NO: 1225 | HUMAN PROTEIN SEQUENCE |
| hR9-004 | SEQ ID NO: 1226 | HUMAN mRNA SEQUENCE |
| hP9-004 | SEQ ID NO: 1227 | HUMAN PROTEIN SEQUENCE |
| hR9-004 | SEQ ID NO: 1228 | HUMAN mRNA SEQUENCE |
| hP9-004 | SEQ ID NO: 1229 | HUMAN PROTEIN SEQUENCE |
| hR9-004 | SEQ ID NO: 1230 | HUMAN mRNA SEQUENCE |
| hP9-004 | SEQ ID NO: 1231 | HUMAN PROTEIN SEQUENCE |
| mD9-017 | SEQ ID NO: 1232 | MOUSE GENOMIC SEQUENCE |
| mR9-017 | SEQ ID NO: 1233 | MOUSE mRNA SEQUENCE |
| mP9-017 | SEQ ID NO: 1234 | MOUSE PROTEIN SEQUENCE |
| hD9-017 | SEQ ID NO: 1235 | HUMAN GENOMIC SEQUENCE |
| hR9-017 | SEQ ID NO: 1236 | HUMAN mRNA SEQUENCE |
| hP9-017 | SEQ ID NO: 1237 | HUMAN PROTEIN SEQUENCE |
| mD9-018 | SEQ ID NO: 1238 | MOUSE GENOMIC SEQUENCE |
| mR9-018 | SEQ ID NO: 1239 | MOUSE mRNA SEQUENCE |
| mP9-018 | SEQ ID NO: 1240 | MOUSE PROTEIN SEQUENCE |
| hD9-018 | SEQ ID NO: 1241 | HUMAN GENOMIC SEQUENCE |
| hR9-018 | SEQ ID NO: 1242 | HUMAN mRNA SEQUENCE |
| hP9-018 | SEQ ID NO: 1243 | HUMAN PROTEIN SEQUENCE |
| hR9-018 | SEQ ID NO: 1244 | HUMAN mRNA SEQUENCE |
| hP9-018 | SEQ ID NO: 1245 | HUMAN PROTEIN SEQUENCE |
| hR9-018 | SEQ ID NO: 1246 | HUMAN mRNA SEQUENCE |
| hP9-018 | SEQ ID NO: 1247 | HUMAN PROTEIN SEQUENCE |
| hR9-018 | SEQ ID NO: 1248 | HUMAN mRNA SEQUENCE |
| hP9-018 | SEQ ID NO: 1249 | HUMAN PROTEIN SEQUENCE |
| hR9-018 | SEQ ID NO: 1250 | HUMAN mRNA SEQUENCE |
| hP9-018 | SEQ ID NO: 1251 | HUMAN PROTEIN SEQUENCE |
| mD10-008 | SEQ ID NO: 1252 | MOUSE GENOMIC SEQUENCE |
| mR10-008 | SEQ ID NO: 1253 | MOUSE mRNA SEQUENCE |
| mP10-008 | SEQ ID NO: 1254 | MOUSE PROTEIN SEQUENCE |
| hD10-008 | SEQ ID NO: 1255 | HUMAN GENOMIC SEQUENCE |
| hR10-008 | SEQ ID NO: 1256 | HUMAN mRNA SEQUENCE |
| hP10-008 | SEQ ID NO: 1257 | HUMAN PROTEIN SEQUENCE |
| hR10-008 | SEQ ID NO: 1258 | HUMAN mRNA SEQUENCE |
| hP10-008 | SEQ ID NO: 1259 | HUMAN PROTEIN SEQUENCE |
| hR10-008 | SEQ ID NO: 1260 | HUMAN mRNA SEQUENCE |
| hP10-008 | SEQ ID NO: 1261 | HUMAN PROTEIN SEQUENCE |
| hR10-008 | SEQ ID NO: 1262 | HUMAN mRNA SEQUENCE |
| hP10-008 | SEQ ID NO: 1263 | HUMAN PROTEIN SEQUENCE |
| mD10-010 | SEQ ID NO: 1264 | MOUSE GENOMIC SEQUENCE |
| mR10-010 | SEQ ID NO: 1265 | MOUSE mRNA SEQUENCE |
| mP10-010 | SEQ ID NO: 1266 | MOUSE PROTEIN SEQUENCE |
| hD10-010 | SEQ ID NO: 1267 | HUMAN GENOMIC SEQUENCE |
| hR10-010 | SEQ ID NO: 1268 | HUMAN mRNA SEQUENCE |
| hP10-010 | SEQ ID NO: 1269 | HUMAN PROTEIN SEQUENCE |
| hR10-010 | SEQ ID NO: 1270 | HUMAN mRNA SEQUENCE |
| hP10-010 | SEQ ID NO: 1271 | HUMAN PROTEIN SEQUENCE |
| hR10-010 | SEQ ID NO: 1272 | HUMAN mRNA SEQUENCE |
| hP10-010 | SEQ ID NO: 1273 | HUMAN PROTEIN SEQUENCE |
| mD10-018 | SEQ ID NO: 1274 | MOUSE GENOMIC SEQUENCE |
| mR10-018 | SEQ ID NO: 1275 | MOUSE mRNA SEQUENCE |
| mP10-018 | SEQ ID NO: 1276 | MOUSE PROTEIN SEQUENCE |
| hD10-018 | SEQ ID NO: 1277 | HUMAN GENOMIC SEQUENCE |
| hR10-018 | SEQ ID NO: 1278 | HUMAN mRNA SEQUENCE |
| hP10-018 | SEQ ID NO: 1279 | HUMAN PROTEIN SEQUENCE |
| hR10-018 | SEQ ID NO: 1280 | HUMAN mRNA SEQUENCE |
| hP10-018 | SEQ ID NO: 1281 | HUMAN PROTEIN SEQUENCE |
| hR10-018 | SEQ ID NO: 1282 | HUMAN mRNA SEQUENCE |
| hP10-018 | SEQ ID NO: 1283 | HUMAN PROTEIN SEQUENCE |
| hR10-018 | SEQ ID NO: 1284 | HUMAN mRNA SEQUENCE |
| hP10-018 | SEQ ID NO: 1285 | HUMAN PROTEIN SEQUENCE |
| hR10-018 | SEQ ID NO: 1286 | HUMAN mRNA SEQUENCE |
| hP10-018 | SEQ ID NO: 1287 | HUMAN PROTEIN SEQUENCE |
| hR10-018 | SEQ ID NO: 1288 | HUMAN mRNA SEQUENCE |
| hP10-018 | SEQ ID NO: 1289 | HUMAN PROTEIN SEQUENCE |
| hR10-018 | SEQ ID NO: 1290 | HUMAN mRNA SEQUENCE |
| hP10-018 | SEQ ID NO: 1291 | HUMAN PROTEIN SEQUENCE |
| mD10-024 | SEQ ID NO: 1292 | MOUSE GENOMIC SEQUENCE |
| mR10-024 | SEQ ID NO: 1293 | MOUSE mRNA SEQUENCE |
| mP10-024 | SEQ ID NO: 1294 | MOUSE PROTEIN SEQUENCE |
| hD10-024 | SEQ ID NO: 1295 | HUMAN GENOMIC SEQUENCE |
| hR10-024 | SEQ ID NO: 1296 | HUMAN mRNA SEQUENCE |
| hP10-024 | SEQ ID NO: 1297 | HUMAN PROTEIN SEQUENCE |
| mD10-025 | SEQ ID NO: 1298 | MOUSE GENOMIC SEQUENCE |
| mR10-025 | SEQ ID NO: 1299 | MOUSE mRNA SEQUENCE |
| mP10-025 | SEQ ID NO: 1300 | MOUSE PROTEIN SEQUENCE |
| hD10-025 | SEQ ID NO: 1301 | HUMAN GENOMIC SEQUENCE |
| hR10-025 | SEQ ID NO: 1302 | HUMAN mRNA SEQUENCE |
| hP10-025 | SEQ ID NO: 1303 | HUMAN PROTEIN SEQUENCE |
| hR10-025 | SEQ ID NO: 1304 | HUMAN mRNA SEQUENCE |
| hP10-025 | SEQ ID NO: 1305 | HUMAN PROTEIN SEQUENCE |
| hR10-025 | SEQ ID NO: 1306 | HUMAN mRNA SEQUENCE |
| hP10-025 | SEQ ID NO: 1307 | HUMAN PROTEIN SEQUENCE |
| hR10-025 | SEQ ID NO: 1308 | HUMAN mRNA SEQUENCE |
| hP10-025 | SEQ ID NO: 1309 | HUMAN PROTEIN SEQUENCE |
| mD10-030 | SEQ ID NO: 1310 | MOUSE GENOMIC SEQUENCE |
| mR10-030 | SEQ ID NO: 1311 | MOUSE mRNA SEQUENCE |
| mP10-030 | SEQ ID NO: 1312 | MOUSE PROTEIN SEQUENCE |
| hD10-030 | SEQ ID NO: 1313 | HUMAN GENOMIC SEQUENCE |
| hR10-030 | SEQ ID NO: 1314 | HUMAN mRNA SEQUENCE |
| hP10-030 | SEQ ID NO: 1315 | HUMAN PROTEIN SEQUENCE |
| hR10-030 | SEQ ID NO: 1316 | HUMAN mRNA SEQUENCE |
| hP10-030 | SEQ ID NO: 1317 | HUMAN PROTEIN SEQUENCE |
| hR10-030 | SEQ ID NO: 1318 | HUMAN mRNA SEQUENCE |
| hP10-030 | SEQ ID NO: 1319 | HUMAN PROTEIN SEQUENCE |
| hR10-030 | SEQ ID NO: 1320 | HUMAN mRNA SEQUENCE |
| hP10-030 | SEQ ID NO: 1321 | HUMAN PROTEIN SEQUENCE |
| hR10-030 | SEQ ID NO: 1322 | HUMAN mRNA SEQUENCE |
| hP10-030 | SEQ ID NO: 1323 | HUMAN PROTEIN SEQUENCE |
| hR10-030 | SEQ ID NO: 1324 | HUMAN mRNA SEQUENCE |
| hP10-030 | SEQ ID NO: 1325 | HUMAN PROTEIN SEQUENCE |
| hR10-030 | SEQ ID NO: 1326 | HUMAN mRNA SEQUENCE |
| hP10-030 | SEQ ID NO: 1327 | HUMAN PROTEIN SEQUENCE |
| hR10-030 | SEQ ID NO: 1328 | HUMAN mRNA SEQUENCE |
| hP10-030 | SEQ ID NO: 1329 | HUMAN PROTEIN SEQUENCE |
| hR10-030 | SEQ ID NO: 1330 | HUMAN mRNA SEQUENCE |
| hP10-030 | SEQ ID NO: 1331 | HUMAN PROTEIN SEQUENCE |
| hR10-030 | SEQ ID NO: 1332 | HUMAN mRNA SEQUENCE |
| hP10-030 | SEQ ID NO: 1333 | HUMAN PROTEIN SEQUENCE |
| hR10-030 | SEQ ID NO: 1334 | HUMAN mRNA SEQUENCE |
| hP10-030 | SEQ ID NO: 1335 | HUMAN PROTEIN SEQUENCE |
| hR10-030 | SEQ ID NO: 1336 | HUMAN mRNA SEQUENCE |
| hP10-030 | SEQ ID NO: 1337 | HUMAN PROTEIN SEQUENCE |
| hR10-030 | SEQ ID NO: 1338 | HUMAN mRNA SEQUENCE |
| hP10-030 | SEQ ID NO: 1339 | HUMAN PROTEIN SEQUENCE |
| hR10-030 | SEQ ID NO: 1340 | HUMAN mRNA SEQUENCE |
| hP10-030 | SEQ ID NO: 1341 | HUMAN PROTEIN SEQUENCE |
| hR10-030 | SEQ ID NO: 1342 | HUMAN mRNA SEQUENCE |
| hP10-030 | SEQ ID NO: 1343 | HUMAN PROTEIN SEQUENCE |
| mD10-037 | SEQ ID NO: 1344 | MOUSE GENOMIC SEQUENCE |
| mR10-037 | SEQ ID NO: 1345 | MOUSE mRNA SEQUENCE |
| mP10-037 | SEQ ID NO: 1346 | MOUSE PROTEIN SEQUENCE |
| mR10-037 | SEQ ID NO: 1347 | MOUSE mRNA SEQUENCE |
| mP10-037 | SEQ ID NO: 1348 | MOUSE PROTEIN SEQUENCE |
| hD10-037 | SEQ ID NO: 1349 | HUMAN GENOMIC SEQUENCE |
| hR10-037 | SEQ ID NO: 1350 | HUMAN mRNA SEQUENCE |
| hP10-037 | SEQ ID NO: 1351 | HUMAN PROTEIN SEQUENCE |
| hR10-037 | SEQ ID NO: 1352 | HUMAN mRNA SEQUENCE |
| hP10-037 | SEQ ID NO: 1353 | HUMAN PROTEIN SEQUENCE |
| mD10-038 | SEQ ID NO: 1354 | MOUSE GENOMIC SEQUENCE |
| mR10-038 | SEQ ID NO: 1355 | MOUSE mRNA SEQUENCE |
| mP10-038 | SEQ ID NO: 1356 | MOUSE PROTEIN SEQUENCE |
| hD10-038 | SEQ ID NO: 1357 | HUMAN GENOMIC SEQUENCE |
| hR10-038 | SEQ ID NO: 1358 | HUMAN mRNA SEQUENCE |
| hP10-038 | SEQ ID NO: 1359 | HUMAN PROTEIN SEQUENCE |
| hR10-038 | SEQ ID NO: 1360 | HUMAN mRNA SEQUENCE |
| hP10-038 | SEQ ID NO: 1361 | HUMAN PROTEIN SEQUENCE |
| hR10-038 | SEQ ID NO: 1362 | HUMAN mRNA SEQUENCE |
| hP10-038 | SEQ ID NO: 1363 | HUMAN PROTEIN SEQUENCE |
| hR10-038 | SEQ ID NO: 1364 | HUMAN mRNA SEQUENCE |
| hP10-038 | SEQ ID NO: 1365 | HUMAN PROTEIN SEQUENCE |
| mD10-040 | SEQ ID NO: 1366 | MOUSE GENOMIC SEQUENCE |
| mR10-040 | SEQ ID NO: 1367 | MOUSE mRNA SEQUENCE |
| mP10-040 | SEQ ID NO: 1368 | MOUSE PROTEIN SEQUENCE |
| hD10-040 | SEQ ID NO: 1369 | HUMAN GENOMIC SEQUENCE |
| hR10-040 | SEQ ID NO: 1370 | HUMAN mRNA SEQUENCE |
| hP10-040 | SEQ ID NO: 1371 | HUMAN PROTEIN SEQUENCE |
| hR10-040 | SEQ ID NO: 1372 | HUMAN mRNA SEQUENCE |
| hP10-040 | SEQ ID NO: 1373 | HUMAN PROTEIN SEQUENCE |
| mD10-044 | SEQ ID NO: 1374 | MOUSE GENOMIC SEQUENCE |
| mR10-044 | SEQ ID NO: 1375 | MOUSE mRNA SEQUENCE |
| mP10-044 | SEQ ID NO: 1376 | MOUSE PROTEIN SEQUENCE |
| hD10-044 | SEQ ID NO: 1377 | HUMAN GENOMIC SEQUENCE |
| hR10-044 | SEQ ID NO: 1378 | HUMAN mRNA SEQUENCE |
| hP10-044 | SEQ ID NO: 1379 | HUMAN PROTEIN SEQUENCE |
| mD11-003 | SEQ ID NO: 1380 | MOUSE GENOMIC SEQUENCE |
| mR11-003 | SEQ ID NO: 1381 | MOUSE mRNA SEQUENCE |
| mP11-003 | SEQ ID NO: 1382 | MOUSE PROTEIN SEQUENCE |
| hD11-003 | SEQ ID NO: 1383 | HUMAN GENOMIC SEQUENCE |
| hR11-003 | SEQ ID NO: 1384 | HUMAN mRNA SEQUENCE |
| hP11-003 | SEQ ID NO: 1385 | HUMAN PROTEIN SEQUENCE |
| hR11-003 | SEQ ID NO: 1386 | HUMAN mRNA SEQUENCE |
| hP11-003 | SEQ ID NO: 1387 | HUMAN PROTEIN SEQUENCE |
| mD11-005 | SEQ ID NO: 1388 | MOUSE GENOMIC SEQUENCE |
| mR11-005 | SEQ ID NO: 1389 | MOUSE mRNA SEQUENCE |
| mP11-005 | SEQ ID NO: 1390 | MOUSE PROTEIN SEQUENCE |
| hD11-005 | SEQ ID NO: 1391 | HUMAN GENOMIC SEQUENCE |
| hR11-005 | SEQ ID NO: 1392 | HUMAN mRNA SEQUENCE |
| hP11-005 | SEQ ID NO: 1393 | HUMAN PROTEIN SEQUENCE |
| hR11-005 | SEQ ID NO: 1394 | HUMAN mRNA SEQUENCE |
| hP11-005 | SEQ ID NO: 1395 | HUMAN PROTEIN SEQUENCE |
| hR11-005 | SEQ ID NO: 1396 | HUMAN mRNA SEQUENCE |
| hP11-005 | SEQ ID NO: 1397 | HUMAN PROTEIN SEQUENCE |
| hR11-005 | SEQ ID NO: 1398 | HUMAN mRNA SEQUENCE |
| hP11-005 | SEQ ID NO: 1399 | HUMAN PROTEIN SEQUENCE |
| mD11-006 | SEQ ID NO: 1400 | MOUSE GENOMIC SEQUENCE |
| mR11-006 | SEQ ID NO: 1401 | MOUSE mRNA SEQUENCE |
| mP11-006 | SEQ ID NO: 1402 | MOUSE PROTEIN SEQUENCE |
| hD11-006 | SEQ ID NO: 1403 | HUMAN GENOMIC SEQUENCE |
| hR11-006 | SEQ ID NO: 1404 | HUMAN mRNA SEQUENCE |
| hP11-006 | SEQ ID NO: 1405 | HUMAN PROTEIN SEQUENCE |
| hR11-006 | SEQ ID NO: 1406 | HUMAN mRNA SEQUENCE |
| hP11-006 | SEQ ID NO: 1407 | HUMAN PROTEIN SEQUENCE |
| mD11-017 | SEQ ID NO: 1408 | MOUSE GENOMIC SEQUENCE |
| mR11-017 | SEQ ID NO: 1409 | MOUSE mRNA SEQUENCE |
| mP11-017 | SEQ ID NO: 1410 | MOUSE PROTEIN SEQUENCE |
| hD11-017 | SEQ ID NO: 1411 | HUMAN GENOMIC SEQUENCE |
| hR11-017 | SEQ ID NO: 1412 | HUMAN mRNA SEQUENCE |
| hP11-017 | SEQ ID NO: 1413 | HUMAN PROTEIN SEQUENCE |
| hR11-017 | SEQ ID NO: 1414 | HUMAN mRNA SEQUENCE |
| hP11-017 | SEQ ID NO: 1415 | HUMAN PROTEIN SEQUENCE |
| mD11-030 | SEQ ID NO: 1416 | MOUSE GENOMIC SEQUENCE |
| mR11-030 | SEQ ID NO: 1417 | MOUSE mRNA SEQUENCE |
| mP11-030 | SEQ ID NO: 1418 | MOUSE PROTEIN SEQUENCE |
| hD11-030 | SEQ ID NO: 1419 | HUMAN GENOMIC SEQUENCE |
| hR11-030 | SEQ ID NO: 1420 | HUMAN mRNA SEQUENCE |
| hP11-030 | SEQ ID NO: 1421 | HUMAN PROTEIN SEQUENCE |
| mD11-035 | SEQ ID NO: 1422 | MOUSE GENOMIC SEQUENCE |
| mR11-035 | SEQ ID NO: 1423 | MOUSE mRNA SEQUENCE |
| mP11-035 | SEQ ID NO: 1424 | MOUSE PROTEIN SEQUENCE |
| hD11-035 | SEQ ID NO: 1425 | HUMAN GENOMIC SEQUENCE |
| hR11-035 | SEQ ID NO: 1426 | HUMAN mRNA SEQUENCE |
| hP11-035 | SEQ ID NO: 1427 | HUMAN PROTEIN SEQUENCE |
| mD11-039 | SEQ ID NO: 1428 | MOUSE GENOMIC SEQUENCE |
| mR11-039 | SEQ ID NO: 1429 | MOUSE mRNA SEQUENCE |
| mP11-039 | SEQ ID NO: 1430 | MOUSE PROTEIN SEQUENCE |
| hD11-039 | SEQ ID NO: 1431 | HUMAN GENOMIC SEQUENCE |
| hR11-039 | SEQ ID NO: 1432 | HUMAN mRNA SEQUENCE |
| hP11-039 | SEQ ID NO: 1433 | HUMAN PROTEIN SEQUENCE |
| hR11-039 | SEQ ID NO: 1434 | HUMAN mRNA SEQUENCE |
| hP11-039 | SEQ ID NO: 1435 | HUMAN PROTEIN SEQUENCE |
| mD6-209 | SEQ ID NO: 1436 | MOUSE GENOMIC SEQUENCE |
| mR6-209 | SEQ ID NO: 1437 | MOUSE mRNA SEQUENCE |
| mP6-209 | SEQ ID NO: 1438 | MOUSE PROTEIN SEQUENCE |
| hD6-209 | SEQ ID NO: 1439 | HUMAN GENOMIC SEQUENCE |
| hR6-209 | SEQ ID NO: 1440 | HUMAN mRNA SEQUENCE |
| hP6-209 | SEQ ID NO: 1441 | HUMAN PROTEIN SEQUENCE |

[0310] The CA sequences were analyzed by Panther™ (Molecular Diagnostics, Palo Alto, Calif.) software designed to detect homologs and enable prediction of molecular function through a system for protein functional classification. Human Gene Ontlogy annotations were prepared in accordance with the Gene Ontology Consortium (Gene Ontology: tool for the unification of biology. The Gene Ontology Consortium Nature Genet. 25: 25-29 (2000)). Similar analysis was carried out by determining IPR information regarding the CA polypeptides from InterPro, which is an integrated documentation resource for protein families, domains and functional sites (Apweiler at al. Bioinformatics 16(12):1145-1150 (2000)).

[0311] The CA sequences may be classified according to the following predicted general classifications of function by Panther™ analysis, human gene ontology and IPR domain information for polypeptides having SEQ ID NOS: 6, 12, 18, 20, 22, 28, 34, 48, 50, 52, 54, 56, 62, 64, 66, 72, 82, 84, 86, 88, 90, 98, 100, 102, 104, 106, 108, 110, 116, 118, 120, 122, 124, 126, 128, 130, 139, 141, 143, 145, 147, 149, 155, 157, 159, 161, 163, 165, 167, 169, 175, 177, 179, 181, 189, 191, 193, 195, 197, 199, 201, 203, 205, 211, 213, 215, 217, 219, 225, 231, 237, 239, 245, 247, 249, 251, 257, 263, 269, 271, 273, 275, 277, 283, 285, 287, 289, 295, 297, 299, 305, 307, 313, 315, 317, 323, 325, 327, 329, 331, 333, 343, 345, 347, 349, 351, 353, 355, 361, 369, 371, 377, 385, 387, 389, 391, 393, 399, 401, 403, 409, 415, 417, 419, 421, 429, 431, 433, 435, 437, 439, 441, 443, 445, 451, 457, 459, 465, 467, 469, 475, 477, 483, 485, 487, 493, 495, 501, 509, 511, 517, 523, 529, 531, 533, 535, 537, 543, 549, 551, 557, 559, 565, 567, 569, 571, 573, 575, 577, 579, 581, 583, 585, 587, 589, 591, 593, 595, 597, 599, 601, 603, 605, 607, 609, 611, 613, 615, 617, 619, 621, 623, 625, 627, 629, 631, 633, 635, 645, 647, 653, 655, 661, 663, 665, 671, 673, 675, 677, 683, 685, 687, 689, 691, 693, 695, 697, 699, 701, 703, 705, 707, 709, 711, 717, 719, 725, 727, 729, 731, 733, 735, 737, 745, 751, 753, 755, 761, 777, 779, 781, 783, 789, 795, 797, 799, 801, 807, 813, 819, 825, 827, 829, 835, 841, 843, 845, 847, 853, 855, 857, 863, 865, 867, 873, 875, 881, 883, 885, 887, 889, 891, 893, 895, 901, 903, 911, 913, 919, 921, 923, 932, 934, 940, 942, 944, 946, 952, 954, 956, 958, 960, 962, 968, 970, 978, 980, 982, 984, 986, 992, 994, 996, 998, 1004, 1006, 1018, 1026, 1028, 1030, 1032, 1034, 1036, 1042, 1048, 1050, 1056, 1058, 1060, 1062, 1064, 1070, 1072, 1074, 1076, 1078, 1084, 1090, 1092, 1094, 1104, 1106, 1114, 1116, 1118, 1124, 1126, 1132, 1134, 1136, 1142, 1144, 1146, 1148, 1150, 1153, 1155, 1157, 1159, 1161, 1167, 1169, 1171, 1177, 1179, 1181, 1187, 1189, 1195, 1197, 1199, 1201, 1207, 1213, 1215, 1217, 1219, 1221, 1223, 1225, 1227, 1229, 1231, 1237, 1243, 1245, 1247, 1249, 1251, 1257, 1259, 1261, 1263, 1269, 1271, 1273, 1279, 1281, 1283, 1285, 1287, 1289, 1291, 1297, 1303, 1305, 1307, 1309, 1315, 1317, 1319, 1321, 1323, 1325, 1327, 1329, 1331, 1333, 1335, 1337, 1339, 1341, 1343, 1351, 1353, 1359, 1361, 1363, 1365, 1371, 1373, 1379, 1385, 1387, 1393, 1395, 1397, 1399, 1405, 1407, 1413, 1415, 1421, 1427, 1433, 1435, and 1441 as shown in Tables 1-124. The classifications of each protein SEQ ID NO are shown in Tables 1-124 with reference to their SEQ ID NO. A CA protein (CAP) has an activity selected from tumor suppressor, low density lipoprotein receptor, G protein coupled receptor, apoptosis inhibitor, ion transport, calcium binding, cell adhesion, signalling, protein kinase receptor, and signal transduction, and any other activity described for a CA protein in Tables 1-124.

[0312] A CA protein (CAP) is expressed on a cell surface, wherein the CA protein is selected from the group consisting of SEQ ID NOS: 6, 12, 18, 20, 22, 28, 34, 48, 50, 52, 54, 56, 62, 64, 66, 72, 82, 84, 86, 88, 90, 98, 100, 102, 104, 106, 108, 110, 116, 118, 120, 122, 124, 126, 128, 130, 139, 141, 143, 145, 147, 149, 155, 157, 159, 161, 163, 165, 167, 169, 175, 177, 179, 181, 189, 191, 193, 195, 197, 199, 201, 203, 205, 211, 213, 215, 217, 219, 225, 231, 237, 239, 245, 247, 249, 251, 257, 263, 269, 271, 273, 275, 277, 283, 285, 287, 289, 295, 297, 299, 305, 307, 313, 315, 317, 323, 325, 327, 329, 331, 333, 343, 345, 347, 349, 351, 353, 355, 361, 369, 371, 377, 385, 387, 389, 391, 393, 399, 401, 403, 409, 415, 417, 419, 421, 429, 431, 433, 435, 437, 439, 441, 443, 445, 451, 457, 459, 465, 467, 469, 475, 477, 483, 485, 487, 493, 495, 501, 509, 511, 517, 523, 529, 531, 533, 535, 537, 543, 549, 551, 557, 559, 565, 567, 569, 571, 573, 575, 577, 579, 581, 583, 585, 587, 589, 591, 593, 595, 597, 599, 601, 603, 605, 607, 609, 611, 613, 615, 617, 619, 621, 623, 625, 627, 629, 631, 633, 635, 645, 647, 653, 655, 661, 663, 665, 671, 673, 675, 677, 683, 685, 687, 689, 691, 693, 695, 697, 699, 701, 703, 705, 707, 709, 711, 717, 719, 725, 727, 729, 731, 733, 735, 737, 745, 751, 753, 755, 761, 777, 779, 781, 783, 789, 795, 797, 799, 801, 807, 813, 819, 825, 827, 829, 835, 841, 843, 845, 847, 853, 855, 857, 863, 865, 867, 873, 875, 881, 883, 885, 887, 889, 891, 893, 895, 901, 903, 911, 913, 919, 921, 923, 932, 934, 940, 942, 944, 946, 952, 954, 956, 958, 960, 962, 968, 970, 978, 980, 982, 984, 986, 992, 994, 996, 998, 1004, 1006, 1018, 1026, 1028, 1030, 1032, 1034, 1036, 1042, 1048, 1050, 1056, 1058, 1060, 1062, 1064, 1070, 1072, 1074, 1076, 1078, 1084, 1090, 1092, 1094, 1104, 1106, 1114, 1116, 1118, 1124, 1126, 1132, 1134, 1136, 1142, 1144, 1146, 1148, 1150, 1153, 1155, 1157, 1159, 1161, 1167, 1169, 1171, 1177, 1179, 1181, 1187, 1189, 1195, 1197, 1199, 1201, 1207, 1213, 1215, 1217, 1219, 1221, 1223, 1225, 1227, 1229, 1231, 1237, 1243, 1245, 1247, 1249, 1251, 1257, 1259, 1261, 1263, 1269, 1271, 1273, 1279, 1281, 1283, 1285, 1287, 1289, 1291, 1297, 1303, 1305, 1307, 1309, 1315, 1317, 1319, 1321, 1323, 1325, 1327, 1329, 1331, 1333, 1335, 1337, 1339, 1341, 1343, 1351, 1353, 1359, 1361, 1363, 1365, 1371, 1373, 1379, 1385, 1387, 1393, 1395, 1397, 1399, 1405, 1407, 1413, 1415, 1421, 1427, 1433, 1435, and 1441.

[0313] Certain aspects of the present invention are described in greater detail in the non-limiting examples that follow.

### EXAMPLES

[0314] The following examples are put forth so as to provide those of ordinary skill in the art with a complete disclosure and description of how to make and use the present invention, and are not intended to limit the scope of what the inventors regard as their invention nor are they intended to represent that the experiments below are all and only experiments performed. Efforts have been made to ensure accuracy with respect to numbers used (e.g. amounts, temperature, etc.) but some experimental errors and deviations should be accounted for. Unless indicated otherwise, parts are parts by weight, molecular weight is weight average molecular weight, temperature is in degrees Celsius, and pressure is at or near atmospheric.

### (a) Example 1

### Insertion Site Analysis Following Tumor Induction in Mice

[0315] Tumors are induced in mice using either mouse mammary tumor virus (MMTV) or murine leukemia virus (MLV). MMTV causes mammary adenocarcinomas and MLV causes a variety of different hematopoetic malignancies (primarily T- or B-cell lymphomas). Three routes of infection are used: (1) injection of neonates with purified virus preparations, (2) infection by milk-borne virus during nursing, and (3) genetic transmission of pathogenic proviruses via the germ-line (Akvr1 and/or Mtv2). The type of malignancy present in each affected mouse is determined by histological analysis of H&E-stained thin sections of formalin-fixed, paraffin-embedded biopsy samples. Host DNA sequences flanking all clonally-integrated proviruses in each tumor are recovered by nested anchored-PCR using two virus-specific primers and two primers specific for a 40 bp double stranded DNA anchor ligated to restriction enzyme digested tumor DNA. Amplified bands representing host/virus junction fragments are cloned and sequenced. Then the host sequences (called “tags”) are used to BLAST analyze the Celera mouse genomic sequence. For each individual tag, three parameters are recorded: (1) the mouse chromosome assignment, (2) base pair coordinates at which the integration occurred, and (3) provirus orientation. Using this information, all available tags from all analyzed tumors are mapped to the mouse genome. To identify the protooncogene targets of provirus insertion mutation, the provirus integration pattern at each cluster of integrants is analyzed relative to the locations of all known genes in the transcriptome. The presence of provirus at the same locus in two or more independent tumors is prima facie evidence that a protooncogene is present at or very near the proviral integration sites. This is because the genome is too large for random integrations to result in observable clustering. Any clustering that is detected is unequivocal evidence for biological selection during tumorigenesis. In order to identify the human orthologs of the protooncogene targets of provirus insertion mutation, a comparative analysis of syntenic regions of the mouse and human genomes is performed.

[0316] An example of PCR amplification of host/virus junction fragments is presented in FIG. 1. Lane 1 contains the amplification products from normal control DNA and lane 2 contains the amplification products from tumor DNA. The bands result from 5′ host/virus junction fragments present in the DNA samples. Lane 1 has bands from the env/3′ LTR junctions from all proviruses (upper) and the host/5′ LTR from the pathogenic endogenous Mtv2 provirus present in this particular mouse strain. This endogenous provirus is detected because its sequence is identical to the new clonally integrated proviruses in the tumor. All four new clonally integrated proviruses known to be in this tumor are readily detected.

### Example 2

### Analysis of Quantitative RT-PCR: Comparative C_{T} Method

[0317] The expression level of target genes is quantified using the ABI PRISM 7900HT Sequence Detection System (Applied Biosystems, California). The method is based on the quantitation of the initial copy number of target template in comparison to that of a reference (normalizer) housekeeper gene (Pre-Developed TaqMan® Assay Reagents Gene Expression Quantification Protocol, Applied Biosystems, 2001). Accumulation of DNA product with each PCR cycle is related to amplicon efficiency and the initial template concentration. Therefore the amplification efficiency of both the target and the normalizer must be approximately equal. The threshold cycle (C_{T}), which is dependent on the starting template copy number and the DNA amplification efficiency, is a PCR cycle during which PCR product growth is exponential. With a similar dynamic range for the target and normalizer, the comparative C_{T} method is applicable.

[0318] An example of the comparative C_{T} method of gene expression for quantitative RT-PCR is shown in FIG. 2. In the first step, assays are performed in quadruplicate on a normal tissue and several sample tissues. In these tissues, the means and standard deviations of C_{T} values are determined for housekeeper genes (chosen as controls if shown to be biologically stable among various samples, irrespective of disease state) and for the target gene. FIG. 2 shows an example of average C_{T} values for a housekeeper gene and target gene. These values can fall within a range from upper teens to 40 depending on the intrinsic expression level of the gene in the particular tissue. The coefficient of variance of all replicate sets cannot exceed 1.5%.

[0319] An assessment of how the ΔC_{T} changes with template dilution verifies that the efficiencies of the target and housekeeper amplicons are approximately equal if the log input amount of template RNA versus ΔC_{T} plot has a slope <0.10. With the relative efficiencies verified for target and housekeeper, the ΔΔC_{T} comparative calculation becomes valid, as mentioned above. An example of the calculated difference between the C_{T} values of target and housekeeper genes (ΔC_{T}) for various samples is shown in FIG. 3. The ΔΔC_{T} is calculated for each sample by subtracting its ΔC_{T} value from the ΔC_{T} value of the baseline (calibrator) sample. If the expression is increased in some samples and decreased in others, ΔΔC_{T} will be a mixture of negative and positive values. The final step in the calculation is to transform these values to absolute values. The formula for this is:
Comparative expression level=2^{-ΔΔCT}

[0320] The final value for the calibrator should always be one. FIG. 4 shows the ΔΔC_{T} and comparative expression level for each sample from FIG. 3.

### (b) Example 3

### Detection of Elevated Levels of cDNA Associated with Cancer Using Arrays

[0321] cDNA sequences representing a variety of candidate CA genes to be screened for differential expression in cancer are assayed by hybridization on polynucleotide arrays. The cDNA sequences include cDNA clones isolated from cell lines or tissues of interest. The cDNA sequences analyzed also include polynucleotides comprising sequence overlap with sequences in the Unigene database, and which encode a variety of gene products of various origins, functionality, and levels of characterization. cDNAs are spotted onto reflective slides (Amersham) according to methods well known in the art at a density of 9,216 spots per slide representing 4,068 sequences (including controls) spotted in duplicate, with approximately 0.8 μl of an approximately 200 ng/μl solution of cDNA.

[0322] PCR products of selected cDNA clones corresponding to the gene products of interest are prepared in a 50% DMSO solution. These PCR products are spotted onto Amersham aluminum microarray slides at a density of 9216 clones per array using a Molecular Dynamics Generation III spotting robot. Clones are spotted in duplicate, for a total of 4608 different sequences per chip.

[0323] cDNA probes are prepared from total RNA obtained by laser capture microdissection (LCM, Arcturus Enginering Inc., Mountain View, Calif.) of tumor tissue samples and normal tissue samples isolated from patients.

[0324] Total RNA is first reverse transcribed into cDNA using a primer containing a T7 RNA polymerase promoter, followed by second strand DNA synthesis. cDNA is then transcribed in vitro to produce antisense RNA using the T7 promoter-mediated expression (see, e.g., Luo et al. (1999) Nature Med 5:117-122), and the antisense RNA is then converted into cDNA. The second set of cDNAs are again transcribed in vitro, using the T7 promoter, to provide antisense RNA. This antisense RNA is then fluorescently labeled, or the RNA is again converted into cDNA, allowing for a third round of T7-mediated amplification to produce more antisense RNA. Thus the procedure provides for two or three rounds of in vitro transcription to produce the final RNA used for fluorescent labeling. Probes are labeled by making fluorescently labeled cDNA from the RNA starting material. Fluorescently labeled cDNAs prepared from the tumor RNA sample are compared to fluorescently labeled cDNAs prepared from normal cell RNA sample. For example, the cDNA probes from the normal cells are labeled with Cy3 fluorescent dye (green) and the cDNA probes prepared from suspected cancer cells are labeled with Cy5 fluorescent dye (red).

[0325] The differential expression assay is performed by mixing equal amounts of probes from tumor cells and normal cells of the same patient. The arrays are prehybridized by incubation for about 2 hrs at 60° C. in 5×SSC, 0.2% SDS, 1 mM EDTA, and then washing three times in water and twice in isopropanol. Following prehybridization of the array, the probe mixture is then hybridized to the array under conditions of high stringency (overnight at 42° C. in 50% formamide, 5×SSC, and 0.2% SDS. After hybridization, the array is washed at 55° C. three times as follows: 1) first wash in 1×SSC/0.2% SDS; 2) second wash in 0.1×SSC/0.2% SDS; and 3) third wash in 0.1×SSC.

[0326] The arrays are then scanned for green and red fluorescence using a Molecular Dynamics Generation III dual color laser-scanner/detector. The images are processed using BioDiscovery Autogene software, and the data from each scan set normalized. The experiment is repeated, this time labeling the two probes with the opposite color in order to perform the assay in both “color directions.” Each experiment is sometimes repeated with two more slides (one in each color direction). The data from each scan is normalized, and the level of fluorescence for each sequence on the array expressed as a ratio of the geometric mean of 8 replicate spots/genes from the four arrays or 4 replicate spots/gene from 2 arrays or some other permutation.

[0327] Normalization: The objective of normalization is to generate a cDNA library in which all transcripts expressed in a particular cell type or tissue are equally represented (S. M. Weissman, Mol. Biol. Med. 4(3):133-143 (1987); Patanjali, et al., Proc. Natl. Acad. Sci. USA 88(5):1943-1947 (1991)), and therefore isolation of as few as 30,000 recombinant clones in an optimally normalized library may represent the entire gene expression repertoire of a cell, estimated to number 10,000 per cell.

[0328] Total RNA is extracted from harvested cells using RNeasy™ Protect Kit (Qiagen, Valencia, Calif.), following manufacturer's recommended procedures. RNA is quantified using RiboGreen™ RNA quantification kit (Molecular Probes, Inc. Eugene, Oreg.). One μg of total RNA is reverse transcribed and PCR amplified using SMART™ PCR cDNA synthesis kit (ClonTech, Palo Alto, Calif.). The cDNA products are size-selected by agarose gel electrophoresis using standard procedures (Sambrook, J. T., et al. Molecular Cloning: A Laboratory Manual, 2d ed., Cold Spring Harbor Laboratory Press, NY). The cDNA is extracted using Bio 101 Geneclean® II kit (Qbiogene, Carlsbad, Calif.). Normalization of the cDNA is carried out using kinetics of hybridization principles: 1.0 μg of cDNA is denatured by heat at 100° C. for 10 minutes, then incubated at 42° C. for 42 hours in the presence of 120 mM NaCl, 10 mM Tris.HCl (pH=8.0), 5 mM EDTA.Na+ and 50% formamide. Single-stranded cDNA (“normalized”) is purified by hydroxyapatite chromatography (#130-0520, BioRad, Hercules, Calif.) following the manufacturer's recommended procedures, amplified and converted to double-stranded cDNA by three cycles of PCR amplification, and cloned into plasmid vectors using standard procedures (Sambrook, J. T., et al. Molecular Cloning: A Laboratory Manual, 2d ed., Cold Spring Harbor Laboratory Press, NY). All primers/adaptors used in the normalization and cloning process are provided by the manufacturer in the SMART™ PCR cDNA synthesis kit (ClonTech, Palo Alto, Calif.). Supercompetent cells (XL-2 Blue Ultracompetent Cells, Stratagene, California) are transfected with the normalized cDNA libraries, plated on solid media and grown overnight at 36° C.

[0329] The sequences of 10,000 recombinants per normalized library are analyzed by capillary sequencing using the ABI PRISM 3700 DNA Analyzer (Applied Biosystems, California). To determine the representation of transcripts in a library, BLAST analysis is performed on the clone sequences to assign transcript identity to each isolated clone, i.e., the sequences of the isolated polynucleotides are first masked to eliminate low complexity sequences using the XBLAST masking program (Clayerie “Effective Large-Scale Sequence Similarity Searches,” Computer Methods for Macromolecular Sequence Analysis, Doolittle, ed., Meth. Enzymol. 266:212-227 Academic Press, NY, N.Y. (1996); see particularly Clayerie, in “Automated DNA Sequencing and Analysis Techniques” Adams et al., eds., Chap. 36, p. 267 Academic Press, San Diego, 1994 and Clayerie et al. Comput. Chem. (1993) 17:191). Generally, masking does not influence the final search results, except to eliminate sequences of relative little interest due to their low complexity, and to eliminate multiple “hits” based on similarity to repetitive regions common to multiple sequences, e.g., Alu repeats. The remaining sequences are then used in a BLASTN vs. GenBank search. The sequences are also used as query sequence in a BLASTX vs. NRP (non-redundant proteins) database search.

[0330] Automated sequencing reactions are performed using a Perkin-Elmer PRISM Dye Terminator Cycle Sequencing Ready Reaction Kit containing AmpliTaq DNA Polymerase, FS, according to the manufacturer's directions. The reactions are cycled on a GeneAmp PCR System 9600 as per manufacturer's instructions, except that they are annealed at 20° C. or 30° C. for one minute. Sequencing reactions are ethanol precipitated, pellets are resuspended in 8 microliters of loading buffer, 1.5 microliters is loaded on a sequencing gel, and the data is collected by an ABI PRISM 3700 DNA Sequencer. (Applied Biosystems, Foster City, Calif.).

[0331] The number of times a sequence is represented in a library is determined by performing sequence identity analysis on the cloned cDNA sequences and assigning transcript identity to each isolated clone. First, each sequence is checked to determine if it is a bacterial, ribosomal, or mitochondrial contaminant. Such sequences are excluded from the subsequent analysis. Second, sequence artifacts, such as vector and repetitive elements, are masked and/or removed from each sequence.

[0332] The remaining sequences are compared via BLAST (Altschul et. al, J. Mol. Biol., 215:40, 1990) to GenBank and EST databases for gene identification and are compared with each other via FastA (Pearson & Lipman, PNAS, 85:2444, 1988) to calculate the frequency of cDNA appearance in the normalized cDNA library. The sequences are also searched against the GenBank and GeneSeq nucleotide databases using the BLASTN program (BLASTN 1.3 MP: Altschul et al., J. Mol. Bio. 215:403, 1990). Fourth, the sequences are analyzed against a non-redundant protein (NRP) database with the BLASTX program (BLASTX 1.3 MP: Altschul et al., supra). This protein database is a combination of the Swiss-Prot, PIR, and NCBI GenPept protein databases. The BLASTX program is run using the default BLOSUM-62 substitution matrix with the filter parameter: “xnu+seg”. The score cutoff utilized is 75. Assembly of overlapping clones into contigs is done using the program Sequencher (Gene Codes Corp.; Ann Arbor, Mich.). The assembled contigs are analyzed using the programs in the GCG package (Genetic Computer Group, University Research Park, 575 Science Drive, Madison, Wis. 53711) Suite Version 10.1.

### (c) Example 4

### Detection of CA-Sequences in Human Cancer Cells and Tissues

[0333] DNA from prostate and breast cancer tissues and other human cancer tissues, human colon, normal human tissues including non-cancerous prostate, and from other human cell lines are extracted following the procedure of Delli Bovi et al. (1986, Cancer Res. 46:6333-6338). The DNA is resuspended in a solution containing 0.05 M Tris HCl buffer, pH 7.8, and 0.1 mM EDTA, and the amount of DNA recovered is determined by microfluorometry using Hoechst 33258 dye. Cesarone, C. et al., Anal Biochem 100:188-197 (1979).

[0334] Polymerase chain reaction (PCR) is performed using Taq polymerase following the conditions recommended by the manufacturer (Perkin Elmer Cetus) with regard to buffer, Mg2+, and nucleotide concentrations. Thermocycling is performed in a DNA cycler by denaturation at 94° C. for 3 min. followed by either 35 or 50 cycles of 94° C. for 1.5 min., 50° C. for 2 min. and 72° C. for 3 min. The ability of the PCR to amplify the selected regions of the CA gene is tested by using a cloned CA polynucleotide(s) as a positive template(s). Optimal Mg²⁺, primer concentrations and requirements for the different cycling temperatures are determined with these templates. The master mix recommended by the manufacturer is used. To detect possible contamination of the master mix components, reactions without template are routinely tested.

[0335] Southern blotting and hybridization are performed as described by Southern, E. M., (J. Mol. Biol. 98:503-517, 1975), using the cloned sequences labeled by the random primer procedure (Feinberg, A. P., et al., 1983, Anal. Biochem. 132:6-13). Prehybridization and hybridization are performed in a solution containing 6×SSPE, 5% Denhardt's, 0.5% SDS, 50% formamide, 100 μg/ml denaturated salmon testis DNA, incubated for 18 hrs at 42° C., followed by washings with 2×SSC and 0.5% SDS at room temperature and at 37° C. and finally in 0.1×SSC with 0.5% SDS at 68° C. for 30 min (Sambrook et al., 1989, in “Molecular Cloning: A Laboratory Manual”, Cold Spring Harbor Lab. Press). For paraffin-embedded tissue sections the conditions described by Wright and Manos (1990, in “PCR Protocols”, Innis et al., eds., Academic Press, pp. 153-158) are followed using primers designed to detect a 250 bp sequence.

### (d) Example 5

### Detection of CA Sequences in Human Cancer Cells and Tissues

[0336] DNA from human cancer tissues, normal human tissues and from other human cell lines is extracted following the procedure of Delli Bovi et al. (1986, Cancer Res. 46:6333-6338). The DNA is resuspended in a solution containing 0.05 M Tris HCl buffer, pH 7.8, and 0.1 mM EDTA, and the amount of DNA recovered is determined by microfluorometry using Hoechst 33258 dye. Cesarone, C. et al., Anal Biochem 100:188-197 (1979).

[0337] Polymerase chain reaction (PCR) is performed using Taq polymerase following the conditions recommended by the manufacturer (Perkin Elmer Cetus) with regard to buffer, Mg²⁺, and nucleotide concentrations. Thermocycling is performed in a DNA cycler by denaturation at 94° C. for 3 min. followed by either 35 or 50 cycles of 94° C. for 1.5 min., 50° C. for 2 min. and 72° C. for 3 min. The ability of the PCR to amplify the selected regions of CA genes is tested by using a cloned CA polynucleotide(s) as a positive template(s). Optimal Mg²⁺, primer concentrations and requirements for the different cycling temperatures are determined with these templates. The master mix recommended by the manufacturer is used. To detect possible contamination of the master mix components, reactions without template are routinely tested.

[0338] Southern blotting and hybridization are performed as described by Southern, E. M., (J. Mol. Biol. 98:503-517, 1975), using the cloned sequences labeled by the random primer procedure (Feinberg, A. P., et al., 1983, Anal. Biochem. 132:6-13). Prehybridization and hybridization are performed in a solution containing 6×SSPE, 5% Denhardt's, 0.5% SDS, 50% formamide, 100 μg/ml denaturated salmon testis DNA, incubated for 18 hrs at 42° C., followed by washings with 2×SSC and 0.5% SDS at room temperature and at 37° C. and finally in 0.1×SSC with 0.5% SDS at 68° C. for 30 min (Sambrook et al., 1989, in “Molecular Cloning: A Laboratory Manual”, Cold Spring Harbor Lab. Press). For paraffin-embedded tissue sections the conditions described by Wright and Manos (1990, in “PCR Protocols”, Innis et al., eds., Academic Press, pp. 153-158) are followed using primers designed to detect a 250 bp sequence.

### (e) Example 6

### Expression of Cloned Polynucleotides in Host Cells

[0339] To study the protein products of CA genes, restriction fragments from CA DNA are cloned into the expression vector pMT2 (Sambrook, et al., Molecular Cloning: A Laboratory Manual, Cold Spring Harbor Laboratory Press pp 16.17-16.22 (1989)) and transfected into COS cells grown in DMEM supplemented with 10% FCS. Transfections are performed employing calcium phosphate techniques (Sambrook, et al (1989) pp. 16.32-16.40, supra) and cell lysates are prepared forty-eight hours after transfection from both transfected and untransfected COS cells. Lysates are subjected to analysis by immunoblotting using anti-peptide antibody.

[0340] In immunoblotting experiments, preparation of cell lysates and electrophoresis are performed according to standard procedures. Protein concentration is determined using BioRad protein assay solutions. After semi-dry electrophoretic transfer to nitrocellulose, the membranes are blocked in 500 mM NaCl, 20 mM Tris, pH 7.5, 0.05% Tween-20 (TTBS) with 5% dry milk. After washing in TTBS and incubation with secondary antibodies (Amersham), enhanced chemiluminescence (ECL) protocols (Amersham) are performed as described by the manufacturer to facilitate detection.

### (f) Example 7

### Generation of Antibodies Against Polypeptides

[0341] Polypeptides, unique to CA genes are synthesized or isolated from bacterial or other (e.g., yeast, baculovirus) expression systems and conjugated to rabbit serum albumin (RSA) with m-maleimido benzoic acid N-hydroxysuccinimide ester (MBS) (Pierce, Rockford, Ill.). Immunization protocols with these peptides are performed according to standard methods. Initially, a pre-bleed of the rabbits is performed prior to immunization. The first immunization includes Freund's complete adjuvant and 500 μg conjugated peptide or 100 μg purified peptide. All subsequent immunizations, performed four weeks after the previous injection, include Freund's incomplete adjuvant with the same amount of protein. Bleeds are conducted seven to ten days after the immunizations.

[0342] For affinity purification of the antibodies, the corresponding CA polypeptide is conjugated to RSA with MBS, and coupled to CNBr-activated Sepharose (Pharmacia, Uppsala, Sweden). Antiserum is diluted 10-fold in 10 mM Tris-HCl, pH 7.5, and incubated overnight with the affinity matrix. After washing, bound antibodies are eluted from the resin with 100 mM glycine, pH 2.5.

### (g) Example 8

### Generation of Monoclonal Antibodies against a CA Polypeptide

[0343] A non-denaturing adjuvant (Ribi, R730, Corixa, Hamilton Mont.) is rehydrated to 4 ml in phosphate buffered saline. 100 μl of this rehydrated adjuvant is then diluted with 400 μl of Hank's Balanced Salt Solution and this is then gently mixed with the cell pellet used for immunization. Approximately 500 μg conjugated peptide or 100 μg purified peptide and Freund's complete are injected into Balb/c mice via foot-pad, once a week. After 6 weeks of weekly injection, a drop of blood is drawn from the tail of each immunized animal to test the titer of antibodies against CA polypeptides using FACS analysis. When the titer reaches at least 1:2000, the mice are sacrificed in a CO₂ chamber followed by cervical dislocation. Lymph nodes are harvested for hybridoma preparation. Lymphocytes from mice with the highest titer are fused with the mouse myeloma line X63-Ag8.653 using 35% polyethylene glycol 4000. On day 10 following the fusion, the hybridoma supernatants are screened for the presence of CAP-specific monoclonal antibodies by fluorescence activated cell sorting (FACS). Conditioned medium from each hybridoma is incubated for 30 minutes with a combined aliquot of PC3, Colo-205, LnCap, or Panc-1 cells. After incubation, the cell samples are washed, resuspended in 0.1 ml diluent and incubated with 1 μg/ml of FITC conjugated F(ab′)2 fragment of goat anti-mouse IgG for 30 min at 4° C. The cells are washed, resuspended in 0.5 ml FACS diluent and analyzed using a FACScan cell analyzer (Becton Dickinson; San Jose, Calif.). Hybridoma clones are selected for further expansion, cloning, and characterization based on their binding to the surface of one or more of cell lines which express the CA polypeptide as assessed by FACS. A hybridoma making a monoclonal antibody designated mAbCA which binds an antigen designated Ag-CA.x and an epitope on that antigen designated Ag-CA.x.1 is selected.

### (h) Example 9

### ELISA Assay for Detecting CA Related Antigens

[0344] To test blood samples for antibodies that bind specifically to recombinantly produced CA antigens, the following procedure is employed. After a recombinant CA related protein is purified, the recombinant protein is diluted in PBS to a concentration of 5 μg/ml (500 ng/100 μl). 100 microliters of the diluted antigen solution is added to each well of a 96-well Immulon 1 plate (Dynatech Laboratories, Chantilly, Va.), and the plate is then incubated for 1 hour at room temperature, or overnight at 4° C., and washed 3 times with 0.05% Tween 20 in PBS. Blocking to reduce nonspecific binding of antibodies is accomplished by adding to each well 200 μl of a 1% solution of bovine serum albumin in PBS/Tween 20 and incubation for 1 hour. After aspiration of the blocking solution, 100 μl of the primary antibody solution (anticoagulated whole blood, plasma, or serum), diluted in the range of 1/16 to 1/2048 in blocking solution, is added and incubated for 1 hour at room temperature or overnight at 4° C. The wells are then washed 3 times, and 100 μl of goat anti-human IgG antibody conjugated to horseradish peroxidase (Organon Teknika, Durham, N.C.), diluted 1/500 or 1/1000 in PBS/Tween 20, 100 μl of o-phenylenediamine dihydrochloride (OPD, Sigma) solution is added to each well and incubated for 5-15 minutes. The OPD solution is prepared by dissolving a 5 mg OPD tablet in 50 ml 1% methanol in H₂O and adding 50 μl 30% H₂O₂ immediately before use. The reaction is stopped by adding 25 l of 4M H₂SO₄. Absorbances are read at 490 nm in a microplate reader (Bio-Rad).

### (i) Example 10

### Identification and Characterization of CA Antigen on Cancer Cell Surface

[0345] A cell pellet of proximately 25 ul packed cell volume of a cancer cell preparation is lysed by first diluting the cells to 0.5 ml in water followed by freezing and thawing three times. The solution is centrifuged at 14,000 rpm. The resulting pellet, containing the cell membrane fragments, is resuspended in 50 μl of SDS sample buffer (Invitrogen, Carlsbad, Calif.). The sample is heated at 80° C. for 5 minutes and then centrifuged for 2 minutes at 14,000 rpm to remove any insoluble materials.

[0346] The samples are analyzed by Western blot using a 4 to 20% polyacrylamide gradient gel in Tris-Glycine SDS (Invitrogen; Carlsbad Calif.) following the manufacturer's directions. Ten microliters of membrane sample are applied to one lane on the polyacrylamide gel. A separate 10 μL sample is reduced first by the addition of 2 μL of dithiothreitol (100 mM) with heating at 80° C. for 2 minutes and then loaded into another lane. Pre-stained molecular weight markers SeeBlue Plus2 (Invitrogen; Carlsbad, Calif.) are used to assess molecular weight on the gel. The gel proteins are transferred to a nitrocellulose membrane using a transfer buffer of 14.4 g/l glycine, 3 g/l of Tris Base, 10% methanol, and 0.05% SDS. The membranes are blocked, probed with a CAP-specific monoclonal antibody (at a concentration of 0.5 ug/ml), and developed using the Invitrogen WesternBreeze Chromogenic Kit-AntiMouse according to the manufacturer's directions. In the reduced sample of the tumor cell membrane samples, a prominent band is observed migrating at a molecular weight within about 10% of the predicted molecular weight of the corresponding CA protein.

### (j) Example 11

### Preparation of Vaccines

[0347] The present invention also relates to a method of stimulating an immune response against cells that express CA polypeptides in a patient using CA polypeptides of the invention that act as an antigen produced by or associated with a malignant cell. This aspect of the invention provides a method of stimulating an immune response in a human against cancer cells or cells that express CA polynucleotides and polypeptides. The method comprises the step of administering to a human an immunogenic amount of a polypeptide comprising: (a) the amino acid sequence of a huma CA protein or (b) a mutein or variant of a polypeptide comprising the amino acid sequence of a human endogenous retrovirus CA protein.

### (k) Example 12

### Generation of Transgenic Animals Expressing Polypeptides as a Means for Testing Therapeutics

[0348] CA nucleic acids are used to generate genetically modified non-human animals, or site specific gene modifications thereof, in cell lines, for the study of function or regulation of prostate tumor-related genes, or to create animal models of diseases, including prostate cancer. The term “transgenic” is intended to encompass genetically modified animals having an exogenous CA gene(s) that is stably transmitted in the host cells where the gene(s) may be altered in sequence to produce a modified protein, or having an exogenous CA LTR promoter operably linked to a reporter gene. Transgenic animals may be made through a nucleic acid construct randomly integrated into the genome. Vectors for stable integration include plasmids, retroviruses and other animal viruses, YACs, and the like. Of interest are transgenic mammals, e.g. cows, pigs, goats, horses, etc., and particularly rodents, e.g. rats, mice, etc.

[0349] The modified cells or animals are useful in the study of CA gene function and regulation. For example, a series of small deletions and/or substitutions may be made in the CA genes to determine the role of different genes in tumorigenesis. Specific constructs of interest include, but are not limited to, antisense constructs to block CA gene expression, expression of dominant negative CA gene mutations, and over-expression of a CA gene. Expression of a CA gene or variants thereof in cells or tissues where it is not normally expressed or at abnormal times of development is provided. In addition, by providing expression of proteins derived from CA in cells in which it is otherwise not normally produced, changes in cellular behavior can be induced.

[0350] DNA constructs for random integration need not include regions of homology to mediate recombination. Conveniently, markers for positive and negative selection are included. For various techniques for transfecting mammalian cells, see Keown et al., Methods in Enzymology 185:527-537 (1990).

[0351] For embryonic stem (ES) cells, an ES cell line is employed, or embryonic cells are obtained freshly from a host, e.g. mouse, rat, guinea pig, etc. Such cells are grown on an appropriate fibroblast-feeder layer or grown in the presence of appropriate growth factors, such as leukemia inhibiting factor (LIF). When ES cells are transformed, they may be used to produce transgenic animals. After transformation, the cells are plated onto a feeder layer in an appropriate medium. Cells containing the construct may be detected by employing a selective medium. After sufficient time for colonies to grow, they are picked and analyzed for the occurrence of integration of the construct. Those colonies that are positive may then be used for embryo manipulation and blastocyst injection. Blastocysts are obtained from 4 to 6 week old superovulated females. The ES cells are trypsinized, and the modified cells are injected into the blastocoel of the blastocyst. After injection, the blastocysts are returned to each uterine horn of pseudopregnant females. Females are then allowed to go to term and the resulting chimeric animals screened for cells bearing the construct. By providing for a different phenotype of the blastocyst and the ES cells, chimeric progeny can be readily detected.

[0352] The chimeric animals are screened for the presence of the modified gene and males and females having the modification are mated to produce homozygous progeny. If the gene alterations cause lethality at some point in development, tissues or organs are maintained as allogeneic or congenic grafts or transplants, or in in vitro culture. The transgenic animals may be any non-human mammal, such as laboratory animals, domestic animals, etc. The transgenic animals are used in functional studies, drug screening, etc., e.g. to determine the effect of a candidate drug on prostate cancer, to test potential therapeutics or treatment regimens, etc.

### (l) Example 13

### Diagnostic Imaging Using CA Specific Antibodies

[0353] The present invention encompasses the use of antibodies to CA polypeptides to accurately stage cancer patients at initial presentation and for early detection of metastatic spread of cancer. Radioimmunoscintigraphy using monoclonal antibodies specific for CA polypeptides can provide an additional cancer-specific diagnostic test. The monoclonal antibodies of the instant invention are used for histopathological diagnosis of carcinomas.

[0354] Subcutaneous human xenografts of cancer cells in nude mice is used to test whether a technetium-99m (^{99m}Tc)-labeled monoclonal antibody of the invention can successfully image the xenografted cancer by external gamma scintography as described for seminoma cells by Marks, et al., Brit. J. Urol. 75:225 (1995). Each monoclonal antibody specific for a CA polypeptide is purified from ascitic fluid of BALB/c mice bearing hybridoma tumors by affinity chromatography on protein A-Sepharose. Purified antibodies, including control monoclonal antibodies such as an avidin-specific monoclonal antibody (Skea, et al., J. Immunol. 151:3557 (1993)) are labeled with ^{99m}Tc following reduction, using the methods of Mather, et al., J. Nucl. Med. 31:692 (1990) and Zhang et al., Nucl. Med. Biol. 19:607 (1992). Nude mice bearing human cancer cells are injected intraperitoneally with 200-500 μCi of ^{99m}Tc-labeled antibody. Twenty-four hours after injection, images of the mice are obtained using a Siemens ZLC3700 gamma camera equipped with a 6 mm pinhole collimator set approximately 8 cm from the animal. To determine monoclonal antibody biodistribution following imaging, the normal organs and tumors are removed, weighed, and the radioactivity of the tissues and a sample of the injectate are measured. Additionally, CA-specific antibodies conjugated to antitumor compounds are used for cancer-specific chemotherapy.

### (m) Example 14

### Immunohistochemical Methods

[0355] Frozen tissue samples from cancer patients are embedded in an optimum cutting temperature (OCT) compound and quick-frozen in isopentane with dry ice. Cryosections are cut with a Leica 3050 CM mictrotome at thickness of 5 μm and thaw-mounted on vectabound-coated slides. The sections are fixed with ethanol at −20° C. and allowed to air dry overnight at room temperature. The fixed sections are stored at −80° C. until use. For immunohistochemistry, the tissue sections are retrieved and first incubated in blocking buffer (PBS, 5% normal goat serum, 0.1% Tween 20) for 30 minutes at room temperature, and then incubated with the CA protein-specific monoclonal antibody and control monoclonal antibodies diluted in blocking buffer (1 μg/ml) for 120 minutes. The sections are then washed three times with the blocking buffer. The bound monoclonal antibodies are detected with a goat anti-mouse IgG+IgM (H+ L) F(ab′)²-peroxidase conjugates and the peroxidase substrate diaminobenzidine (1 mg/ml, Sigma Catalog No. D 5637) in 0.1 M sodium acetate buffer pH 5.05 and 0.003% hydrogen peroxide (Sigma cat. No. H1009). The stained slides are counter-stained with hematoxylin and examined under Nikon microscope.

[0356] Monoclonal antibody against a CA protein (antigen) is used to test reactivity with various cell lines from different types of tissues. Cells from different established cell lines are removed from the growth surface without using proteases, packed and embedded in OCT compound. The cells are frozen and sectioned, then stained using a standard IHC protocol. The CellArray™ technology is described in WO 01/43869. Normal tissue (human) obtained by surgical resection are frozen and mounted. Cryosections are cut with a Leica 3050 CM mictrotome at thickness of 5 μm and thaw-mounted on vectabound-coated slides. The sections are fixed with ethanol at −20° C. and allowed to air dry overnight at room temperature. PolyMICA™ Detection kit is used to determine binding of a CA-specific monoclonal antibody to normal tissue. Primary monoclonal antibody is used at a final concentration of 1 μg/ml.

[0357] All publications and patent applications cited in this specification are herein incorporated by reference as if each individual publication or patent application were specifically and individually indicated to be incorporated by reference.

[0358] Although the foregoing invention has been described in some detail by way of illustration and example for purposes of clarity of understanding, it will be readily apparent to those of ordinary skill in the art in light of the teachings of this invention that certain changes and modifications may be made thereto without departing from the spirit or scope of the appended claims.

The application's sequence listing, which the Patent Office published only in electronic form, follows.

SEQUENCE LISTING (1441 sequences)

SEQ ID NO: 1 - DNA, 30908 bp, Mus musculus
  misc_feature (1)...(30908): n = A,T,C or G
gaaattgggttccttgtttaatgatggtgtcggggaaagacgtggatggggagttccattctcagcccgctgctactgcctgtgagcctcctttgggaaagtccttaatttctctagttctgttatttcctcatctctagaatgggcatcacgacactgatttcacagagttgttccgagatgaaatgatgtgatggagtaagtactagttcccagcctctcagatcctggaaatgggtgtcctgcctctccctctggaagctccctgaaggccaggctttgggtccttcatccaagcttggatgagtattttaaaagagtctccgtgagttttgctcattagccaaaacggatgctggcctttggaagcggggcggatgactctgcgtggaaatattcttctctgagtttccctcctctgcctacttcctcgtgagttctatgtggcatctatttgaggtcaaatctattgaaatatacttcagcttaactctaggtgccttttagttgagcaccaagaatatactaagtgctatgtaagaaatagataaaggacccagtatggaggaggagaaataccaagccaagcctagtactcaaaccgcagacagtgatagggacagccggatcgctttctgtaggcttgagggtttctgaaattcttcagggaattgggagctctttgagctggacttttttaagcgtatgagtgtttggtctctctctatgcatctgtgtcatgagcatacctggtacctatggagaacaggagagggtatcagacaccctggaactacagatagttgtcagttgccatgtgggtgctgggaaacccaccctaggtcctctgcaggaacagcaagtgctgaagggactactgagctgtctctccagccccttacgttaaatcttgaagaacgggttaaaagatgacagagcgggggagaggtaccggagagaaaaatgtgtgaaagtagtcagggccttgacctggaagagttagagaacaaggcagatgcagttggcaggtccggagcaacagctcctgagtgttcaatgggccaagttgagaggggctttggatgccatgaaaggttgccgaggagaaggaagtagagagtgagtccttcagctaccacaggggaagggtgggaagggggtgaggagatttcctaaatgtgcatcattggccttctgaggtcttcagaagacgaccagtggggtccccaaagggtgagaccagacagaacagacagccactattccctactctgaccccctacctcaagaggaaaggacgaagagagagctgagaagagaccctgagcctcttcaccacagcagacaggaccaagtttcagcaggcaccaggacactcaggtgtctacgtcagtcgctagctatgcacatgggtaccctgggcatggaaagtacagactggctttctaacacatcattttgccgtgagaccaatcccagcattccctctattgtcctcaacagaatcaaacgtccaagctaaggggcttgccacctctccaaaataaaggtcaccttagaggtcaagaaagcattgacacaaaccttgggtaagccctaagactgtaacttgggagttgtcatgacaacagggcagtagagccatctctactctctcctaaatggcacgaggtttagatgagtaactctgaaagaacagaccccacccctgttttcctatttaccatcttcagacccctcctcacctgtgccccagccctctcctctaggaccttagcaacttgaacaacatagacacacacgcctcctctcagtgtccaacaatgagccctcccagcaaaacaggaagcctcttgctgccaaggcattgtgcttgccctgtcacgtgtcaggaaaccactaccgtgccatggcaacaggtgttgctgagaccttagccttcccgccaacctgtgccctgcccttctctctcctccttactcctagagagtgtcctcgttgtgcagtgtccttgactcacctggacactgctgtgagtgagcgtcctaattaccttaacttggatgagaagactaattcaccctataagtcagtggcccagggccagggcttgggccttagactgcataaaaaggagaaagcttgccgactgcaggtgttcatctccccttgtttcctgcctatcagtgcaatgtcaccagccactccaagccaatgtcaccaccagccaccccaagctcctgctgccatgattccccaaccaggatggactctacgctggaactgtgagctgtattaacgcttctcccctaaatttttcttgtcaaggtgttttcatcacaacagcagaaaaaccaaaaccaactgacacttcctccttgcaactggcagctcacatcgcttgctcctttcccatttggacaccaaagatctcactgatcatcatccaaacacagttcttcatgctagccaggcaacataagaatgtacctgtgtggaaatttagcaagcttcttagctcttttggatcgcaaaagtctaggtaaggtctgagatgactctctctcaaattccaatatccctaaatgtatgccagaccttcctgtaaggttgctgagtcctgaagctaaactgactgtcttagttaaggttagtagtgctaccacaccaaaaacaaaacaaacaaacaaaaaaaaaatgaacaagccaggcgtggtggtgcatgcctttaattccagcactcgggaggcagaggcaagcagatttctgagttcaagaccagcctggtctacaaagtgagttccaggacagccagggctacacagagaaaccctgtctcaaaaaaacaaacaaacaaacaaataacagcaacaacaacaaaaacatgaacaaaagctatttggttggggaaggttttattggctcacacttccatatcatggtccattatcaaaggaagtcagggcaggcactcaaggcaaggcaggaacctagaggcaggagctgatgctgaggccatggaagagtgttgcttactggcttgctgagtctgctttcttttatcatccattgttacatggagattaatcaaagttgcatgaaaagaagagagaaggacctcctcagacgcagatggaagcatgtggtcctttgttaggactctgaagggcagtggtctctcagaaaaaggctgtcagccaaggcacagggggtttgagggttttataggacagaaaaggaagcgtttgtggttggaaaattccatctgcagatctgtttcctcaagtctcagcactgtaaataccaacggaggttcttatccattagtgaatttcttgtcaggagaatcccggctcctaactgcctgcagatgttagcagtgtatccctggtgccatccggagtttctcagctctcctggggcttttaggtcattaacccttcacccaagaccagcagcagcagcaccgcccagtgaactagcctcagagactcaccctacaggccaatctgatggacgcatttttctcaactgtggttccctcttctcaaatgactctagagtgtgttaaattgacataaaactagccagcacactgatgattctggagtgaaatcaaaaggagcttgaagatgagggtggggacagaggcaagggtatgtcttagactttactcattgaattgcaagccgagaaggattagaagacatcagcagtatcagtggacaagtggcatttgaatgccatatggaagaaggacaataagaagttcctgcagacctggttccatccagaagcctctgctctgactcctctcccgggactctttaggtcaaggactttctccaggggtctcaagactttctgtgttcctttatactaagttttctttcatcctgtgaacaatcaagtcatcagtgaggtggttgggtgacatggcccataaagatgacttccagggacctggttcctgctcacactctgaaacctttgctcctgggcaaaacttcccctaaagaacaatgacacacattctcagagaacagagaacaataagccgtgtgtaacaacatcttccagagagagagaagcgtggatttagtccttttgggccacgctcagcatcagcaggagctagcttgacataaggagaaaagccccttagcttggagctaaaggtcacatcacttttaagtctcagtttctacagccacagaacagaaagttaccaaacacagcagcctgagggtttcatgtgagaaggtcatggagtcccaatcactcactccttaaacttgactctgtctgcagcccccagctggccttgaacttgtggcagtggagaatgtgcttgaaatacagaagccaaatagaaacctggaaatgttacttgtcactggttggaagccctggaccatggtggatggacactcgattctgagtacctacccccaggactccccagagtagatgtttatagttgctggatgatggtggatggacagacagacacggactggcgcctaagaaaagtctagcatgtcatcacgtactccagcagcccgagagcttcatgtcaaagacacaaagcaaagccatctcatgtgccaaccacaacctagccaatgggcagttatcaaagccagaaatctggcctagaggccatagcactctaaaatgaggccaagttaaactatgtggcgctctctgccctccaaactgccaacttcagcagcccttttgaagctgagtcaaactcctgaccatagcgtttcttttcaccactgccttcctccctcacctggcccactccctcagctctctaggtgccactcttcccataggagtcttggttggactcctactgtgcctaagctatgccaggctgttccctagctaagtcctgcagtgttgtgatgcaatattgtcctccattatttcctaaataccatgaaatatttaatatataaagccataaaaagccgggcatggtggctcacacctttaatcccagcacttgggaggcagaggcaggcaaatttctgagttcaaggccagcctggtctacagagtgagttccaggacagccagggctacacagagaaaccctgtctcgaaaaaacaacaacaacaataacaacaacaaaaagccgtaaaaaataatgcaatgaagactttagttcatcataaataaaacatcaccttccgagcccttcccaaaattaaggtgagcctgtttgtgggtgccatttctcttcatattgtttgagagtgattgtgtcttgtcatttgtctcactttgtgttccttggttttttggccacagagtctcactctgtaaaggtggcagatccaagtgtggcaatcttcctacctcagctgctgctgctgctgctgctgctgctgctgctgcttcttcttcttcttcttcttcttcttcttcttcttcttcttcttcttcttcttcttcttcttcttcttcttcttcttcttctttttcttcttcttcttcttcatacggtattctgcctccatgtatacctgcaggccagaaaaggacaccagatctcattagagatggttatgagccaccatgtggttgctgggaattgaactcaggacctcttcaagagcagccagtgctttgaatgtctgtgctgtctcttcagccttcctcctcctcctcctcttcctcctcttaataatttacttttattttatgtacattggtgttctgactgtatatatgagggtgccagctcccttggatcaggagtcatagacagttgtgagctgccatgtgggtgctgggaactgaacccaggtcctttggaaaaacagccagtgcgcttaactgcagagccatctgtccagcccctgcctcagcttcttagtgctaagattacaggacttcatcagaaccctctgttgataagacaagatccatctttgtctatcttcttcactgtggtggactggatactccctaccaccatcacccacaaagatcatatgctaaagttatgaccctacgatggctggatttgagaataaagctgttgggggttggttttaatgctttgaattaatccagcccccaaaatcgggaaactgcatgtccaaacactaaagatccttgtccccaattggtttttgatcaatcaaaaaagagccaatggccaatggttgggcaggtagactgaaacaagacctttagatttgctcaggctgggaactgggagagaggaaggagagagcattgtcgtggtttggagggaaacagatcagaattagagacgcaaaaggaaaagcatccgaaatgtaggagagaaagaattcgggccctggaggaacagctcagaagtgtcttgggcagcaaagactggggtaggggcacccagaaggagccagggcaacaaagataaaatatagaattagagggcattaagccaggagtaccaaagggaaatgtgttctagccacagggaagattagaactgcccagcctttgagctagtcaaagcatatttaaaattaactggtgtgtgtgtgtgtgtgtgtgtgtgtgtgtgtgtgtgtgtgcttcattcttgaatccagatagctcttgggcaggtgcatgggtgtgacgaatcgggagcacaaaatgatttagctaactactgctacgtagagaatctaaggaagttatttaaattaaatagcactatagagtagggtcctggttccatggaattggtatgtgagtgacattaccagaaattgaccctactggcctttgccttgggacttccagcctctagaaccatgaggaaacatatttctgttgtgtaagacatccagtccatggtattttaagagtccaaacagactactcactccatgtaagttaagcaaggccaaggatcatgtgtgcttgtctttggatcaatactgtccatcactatacctaacacataagtgcatgccaaatatctgtttgttgaatgaatgaatgaatgaatgaatgaatgaatgaatgaattagataattactaaaacaaaacatatagggttctggggtatgcaagatggtttaatgggtaaaggtgcttgctgacaagcctgacaacctgagtttgatcccaggagtagacctggtgggaagaggagacttactcctgcaagatgtcctctgacctcaacaagcatgctgtgccacatgcctgcacacagctctttctccctctcccttcccccacccccattctctccttccttccctcatgcctcaacatgaaagctctcggctactgctcccataccttgtttgcctgcctgcctcctgccatgccatcatccaccatgatggatgtgaactcatcctctgaaactgtaagcaagcctacaattaaatgctttcttatataagttaccttggtcttgccatctgttcacaggaataaaaaactaaatacaacaaattatacatgccccccccaaaaacccttgtaaatgaatatttatagcaacaatactcatgataactaaatagtagaaacaatccaaatagccaactaatagtagataaaacaaatgtggtatatccacacaatggaatattattcagccacagaaaggagtggagagttgaaacatactccatatagatgaacctaattaaaagaagatagatatgaaggtaacattgtgtctatttatgtgcattaatcaacagaagcaaatctacagaaagaaagtaggtctgcggctcagagcagttatgtgcacaggtggaaaggacatgggaatcatcggaaataatggctgaggagatctgactaaaaatgattcaaagtttaccgtggcgaataaacgccgtgactatataaacaccacagaaatgtctactttaaaagaggaaatgtggggacgggagagatggcgcaacagttaaggacacttgatgctcttgctgaggatccaggctcagttcccagcacccacacatcagctcacaaggcctgtaactccagttccagaggatctgacgccgtcttctgacctccacgggctgtaggcacacaggtggtacacagaaaggcactcaggcaaatgctcatacacataaaataaaaatcaatgaatcgttttcaaaggtgaatttagatatgaactatagctaactagagctgttgtcttttaaaagaaaggaaggaaacacagatgaattcctttctttcaaccttccattacctgtcagtataacctcatggccaattctctccagaagctagagggaaagtcgtccgggaaatgtagtccctgtatgcagagcagagcaagggtatcaagtgagtgcctaaagggttatgttgtcatggcaactgttttaactatttatttatcttatgtatatgagtacactgtcactctcttcagacacaccagaagagggcatcgggtcccattacagatggttgtgagccaacgcgtggttgctggggattgaactcaggacctctggaggagcagtcagtgctcttacccactgagccatctctccagccccctgtttttaactagttaatacagaagaagggctaagtcattctgagctctgtgtcgggtcctgtcgctcactgaattgtctacaatcagtggctagagataaaaaaatttacaggtgtctctcctggaaatggaacatttagatatttgctctagaactcaatggccacccacagtccccacatgatctctatgcttgttttaaacccactccttggactggggaggtggcttagtagctaacagagaattgccccacaaacacgaggaactgagtccaaatcccagaaccctcataagcagcttggcagtagcatgagcattcgtcatcctagcagtcccccaaggagatgggaagcagagacaagagaccacgcacccagaaggccagctcaccttagtatagaatggggcactcaataaagacgtgatacctgcaacagaatggaagtaggctgacacctgacattgtctctgatcttcacacgtgcaatggcataaaatccccacattcacgcatacgatcgcacacatacacgtgtgtacacacaccatacacaccacacaggcacaacaattaaaaatgccaataaatatatcaatcagtttccctgtgggggaaaatgggtgtggtcacaaagaataaaaaaagtaaaataaaaataggccaggcatggtggcatatgtctttaataccagcactcgggaggcagatgcaggtagatctccatgggttcgaggctagctaggtccacagaacaagttctaggacaatcatggcactgacaaaaataaaataaaataaaataaaataaaataaaataaataaataaataaataaataaataaataaataaatctcttcttggggaaccagtttggataatgacttagacttgatgtcctctcggttagtagagaaagccgaggggctccaggcaccctcatatctagcatctaggtcctgtgatgtttagcttaagtactaaaaataaacactcaaactttcacttcgtggttgtgtcactgaagccttgctggccggaccgttcaacagacctcaccctggctgcgcaggtgtatgtcggggctgcctggcggctgctgggacaatagccactgatcaagttcatactgaaagggagacttttattcaaaaccaagagaaggatgcaagtacacctctgactcccgagcctcagcctatctcaccccacagcagccacccaggcgtgcttggcactcacagatgtaagcagctcctccctgagtctctacaaggcactactaccaggggctttctgaaggcaaacgactcagtgattcaggatcctatgacagccgaatgtggttatcacataccttgtggcccaggaagactctgaggggtgggacaggagtgggaggggctctggaacaacttaaaaggggctcttaccacttcctccctgccagagagggctagctggagagagacaagaaccaaaagcacagccttcctgtgtgatttctacagcccccagagcaccatggacccaggtaagtaagctttctcttaagagaagtcaaaacttctgacacaaagccagactctagggcaatgaacatgcatgggggataggggtcatgggggggggggggagtttccagagcaatcagggcagttggtgtgaactggtggctgctttcagagaatgccatcccgttggatgaggcattggagagaggatgtacctgctctttcagacccaggggaaggaacagctgtggatgccaagacagacacaggcataaagttgggtcctctcaagcagcaggcaatgaacagcctggtagactgaccttgatgcctggatagaacacgttctcagctggtagggatgggtgatgttctctggcacctctggggactaagaaaattctctttagagagttcaggacaccctgctcccactctgggtccctcctttctgtcctgttaaaccaggatttgaatctccttgctcacgagaagagtgaaactgatggaaactgtgctgtgcatagtgcaatacaaatactagctgccacctctgcctcttgttgtctctgcctgtcatctgtctgtctgtctctgtctgtcttcctccctcccttcctccctcctacacatcccaggttttgtgcctcttgcaggttaaagggtgaatgactaacataaaattgagtggcccagggggcactccacgtagagaaactgtagccagcacagcacagcccctaaaacaaagcccacacaccacagccctctctataacaagctattctaccaggcaagcctcagtgtctactatagcaaagtgccaaggggagtccagctccagacaccccagttacacatcttaaatctcggctgcagagtcagactcggctggggctggaggggccaagttcctagagttccgctcaccagcctcaaagccacaaggggttgactttaaaaagtgaaggttccctggtgctgtcctcacaccccctccaagccacaccacagccagcagcatctttatctgtctctcctgcccagcgtgcattgcaccctagatctagatccagctgtggaaggtatatagtggggtccacctctgctggctatgaactcatgggaagcaggattttgttcttacacctctgcctctcagatgttttgggtgtaagtaaaaagtgttgatgggagggagggagagagggatggaggaatggatggatggatggatggatggatggatggatggatggatggatgtgtggatggatggatggatagaatcagcctctctaagtatattttagaaagcaaatatctattccagcttctcctcccacctgcctgctttctaagcctacacctcaggtatctacctccaccagccatagtctcagagaacccacaccatccaccaaagatcttctccaccttcctaaaatgtggctcccagaatagggaaaggttctaaatttacagcatttgccaatttccatggtgtaaattttaccatcccaattgaccttagtcggtcccattaaaggtctaaatgttttgacacaaaaaggagacagacacctgccttccttggcacttgggacactatagagtctctcctgaactaggtttggggatgctaaatgcatggctttgatacagggggtggggcaaactctggtcctggaagaagagatagtcttgcttttttactcaacttaagaagcaccctaatagctaactctgaaatgctggtgtgaggggaaactgcttaagaagttttgctcaaaacaggctccggcgccgttggaagggcgggtgggccacaaactatctgtttttcactctttgtctacctagtagggacaggaggtgggtgagaaggcctaggtttctgttatacaaaatgagaaactacaaaccagggctgagctggcctctttcatgatttgaatgagcagccctgatatacccttcctaacttcaagacatgggaccacagatctcagcacaacatctcaaaatcagagaaggggagggggtgacaaatgaacccataagagacttgtgtctcacagctcagctgtagatggcagtagaagagaattcagggtcattctcttgtggccctccagaaacctggctgtggagaacactggagcccagagtagctaggaaaaaacgctcctctgtgtggtattgtcttccagtcatgtgtcactcattgagaacttcttgaatacagagtctggtggggaacgtaacatgtatgtcaacacgcaacaccaacagtgagagacacagcactcctgagggggcataaggacaagattcaaaagcaaaaagcaaggctgtgaacacgtgtccagaaagcatggcaattgtattttgaagggtgtgtagaagttgtcaaacctaataaagaagggccaggttgtagccagatcttcagactctacagccttaagccaacaaagtaaatgaggcatccgagtgtcaggaacgtgactggcacacaagcctgaggaacctgagcttgtagcctcagagtttaaaagctggctgtagcaaggtacacacgtaatacctaagcctgcttagggaggcaggaataataagacttgctggccaaccagtcttcagaattggcaaactccaggttccatgagagacactgatgtcagcctctgacctctgtatgtgtgcacacccatacatatatgagcacacaccttgagctcatagtcagtcagctctggtgaaggcaatagagcaacaaggaagggggaatggtgtcagctgatgggagtcagggaaatagatgtgccaagaaacaagctagactggggtggcccttacagcgctgtgtgacagcaccagggaatccatacaccaccctaaaaagaatgggggccagcaaaggtcccccacccttttccaaatagatgggcagatagatgaaatgtgtgttttggaaggagtaggggacaacagatccttgtatcaggacaggggagggaccaacatcaaaagatgtggaagatcgagatgtggaagcaacagacacgagtggccagaagcagtagagagagcaagagtggccttgatctgtggaggaccctccacacccaaggctcatcagtaatgtcacatgactcagccattagaacccaggctagatgttcccctttcccatctctgatctattgtttaatagctatgtgaatccagaggaacgacataacatctctgggcctgtttcctagaatacaaaaggaacttacaagatgttatgaggggggagagatgtagggagaggagctaggagtgaggtggccatggccaggggctgggtgtccttagggaagccttgtgctgacagttcttccgttggggctgattgtcacgtggggtctcacagggtatccattgaggacggggatggcagcgcctgtctcacgtggacagcgcacttcactgaaagctcagtgggtgccaattgcatcactgagtgacagcgttggtgccctaataacaagatcccaccagctctcacatccctgcctcccatctgcgggctgggtccctgcttcagcctctgccctttctcatgtcccctacaagcggctgagaaggtccagagagaaaatcatcacctgaggtgtctctcgggccagatgataagcagccatggtttcctgggcagcctggagggactgggggaatgtacagatgggagctttaggacctgagcaggaggcgactggcttcccaggctgggagctgggggcgggggagggaattgagtgtcaggctgaggcagggcagggcaggggagttgggatggtgtcgggctagagtgctagggagttttcctttcaccttaatcattctgcaaacccaagaactcaggaaacaccgaacacctcaatcaacagctcccccacactggcattcccaactgcccgtagctcaagagcagttgctttctgactattgagtcatctgactcaccaacactgaccaggtccctctgtcaccacacgttcaaattcccccaaattctcctgttaactgccttgaacatggcctgtcctggatctacaggaccccgactcacccacccaacccccacccccaacctcatatccagtatccctggaatgagacatcaattttgttcacacaccccagagcccctccgggtttgtggctacaaaagaaccgggacagaacccagagtaaaacagaaacagttcttgttccttaggggtttctccacgtccctgacagtcagattgggctttctctacagtaaccgaaagccgttgatgggttgaaagaaacctcgaacgctgaaccccgaaatgagtcagggaagggcgggctgtgcatcagaccctgaaaatcctatagttgagaatgggcatgtgacctcaagctcgtggggtgggggtggggtgccaggggtaattcagttgggggggggaatgtgtgagagagatgagctgtgaagccacgtggtgatgttccccttcctgtctccaaacgttctagtacaagctgatgataaggggacagtggctgtctgtccccagaaaaagatggagctggtgaggcatgggccccacgctaagcctaagcgtctctctatctctacagctaggatttcgacttatggttagggatttaggagggaggcaagataggaatagagggcagagttagcttcagtaagacgtgcttacatagcatggaggagaatgtagaggggaaaaacgtttgtccgggtcaccctgatgcccttcctgcctgtactgagtgaccaagcgtagcctcctcagcctggagtacatgtcaggtaccctgggtgtcatgtagcctagtctccagcaggtggtgctatggccaaggacaaacaacatctgcgtttgaactgtttccctggcctcaagaggtcccccagactcagattggggagcaaagtcctactctggactgcaagacccatagggtctgactcttcctgtagatctgaagaactgggattcaagggctggagaggggtgccaatagcaaagaaggcggatcaagggtccccaggggtgagacgggagtatgtggggtagaggtctggggtggggggcataagatgtctgcaaaaattacttttccagttgtcctcttgcttagctgtcaggagaaaatacagcccaggctggctcaaggctcagctctgagcagaatgaggagtggtcgctgtcatatgcaagcctgttctaaccagtggtctctgtctgcagagtattcgaaaacacgttgagggagagagaacagattcccatttccttagcccttagaacatctgtgaggcttcacatgtggctgtctgtgcccttgaccatcaaggaatgctcccaggccggtggatcttgccaccaaggaagtgttgaacatgtgtgcatacatcccgactaccacagggctgtgcatcatgtggaatgggaagttgggggggggggagtcaggaccctgtgcggaaccagcagtctggaggagttattggggtacagtggatactgcaaaccagcagcagcctagactggccagggcaggggaggggggaggggaatgggaggggtattattaatttcttccagcctcagtttcttccagcttacaggttccttggctgtaaaataggaataatgtcatcagtattgggannnnnnnnnnnnnnnnnnnngaggtgaagacagggaatgctgggcagcaggccaggtgttcaaacacacaatctggttctgatgttctctttcagcaagcccgaggtgcctggagcctgggataaaagttcccaatggtgcccctgccccacccccgaatgtctccttaatcaccgagcaatttttaccggggcggtaacatcatctcctttgtctcctctagggaaacccaggaaaaacgtgctggtggtggctctccttgtcattttccaggtgaggcttcctgccagggcaagagctctcttccctcctccacaccccctccccagccaggagtgctggaacacaaacagaccgctgcaaggaacgaaaggtctagacacaaacccacctgccgttcacggccccttgccccccccccgcctccccccacgaagggggcaggcattctctggacttccattgtccccctttaaaataaagcccagggagacgtaacctacccccaccctcgttcttcccagctcccacctcctcactcaggagacagaaacagtgtctgagatctcttagacttgtgcaacacagggcttagagtgggcctggttttgcacataggtgcacacatcatctgtgaactgagaaaaggaccctcggtcgggcgctctggttactccccagtcacccagagttgcttcctcttgcctttcagtccaagggtctccttgtaatctcattctgttttccttcataaaatagaaagaccttggcttggcttgcctgtggggagcaggagggagaatgagtggagcccgggacccgggtggagaggacggtgaagggaacacatagtgggtctgaattctgcagagccaagagcccactccgttctctatcccagcaatggaggcagaacgtgtgtctccccaaccaccagagtcaggagaaactctgagagtcaagtttcctcaattggggtaggactctctcaaggtggggaatggccacggccagcctggagaagcaatgcttcaggatttgactttctcccaggtccggaggccagagggggagctttccaggagctcaggccaggcacaggccccaggctgggcactgttccccaaacccctctcagaggccccctggagcttgggttgcagccccttagcctggccctttccccatcaccactcccgcccctcctgtactgctggctggaaggccagagaagggtaaagacatctgtggctggtttttgtctttcacttgggaggaagggggggggggggttcagacaaggccggatgtggtggggctgtgggctgcagaggcggcaagcttgggggaaggggtgttgaacaggagggagaagagaagactgggagggaggtggtgtgggagcacacttcatagaagctgggagttctgacctccaaagggtctagaagccctttaagcctctggggccgcagacctaaggccacagacccattcgtgaagagccaagcgcagctaacctctcccagggcccccaggctgcagtcaaacctggaccagggaaacaaggttgctatggactcttcttctcaagttagccatgccccaagaaagggctcctgaacaccactttgtccttatcctgtcggtaggctcacaatggtggtgcgatctgtggatcaccactgaatgactgaaaatctcctacccagaggaggaaccctaaactttccaaagtgggccttcaaaccaccccaccccctcccatctgtggtggtccatccatcacacacaggcagacggcaggcaccccctccattgataaaaatcacagcagctgctgaaccgtcccccacacgcaccctgcagccctgctaaagggctaaaaaaagcccagaacagctgagccctgctgattgggatctgccggaagagaggcaaagaggtgtgggaagagggtgggaacacagagggagagtgggggaagagagccgcttccttccaggggcacaagccgccataggaaggcagtcacatttacccaagcactaccccacaggccctacggtacatttgtctacgcgctgagtgtagtgggtaccagggagctgtgaaaatccccatgtctcttatcagcagtccctcgactgaagtttattcctacaaaggagctttgatcttctcttcctgcttcggaccttcctcaaccttgaacctaacatagggggttgtttttttgttttttccctcgaaagctgaggcattttgtagcccccaccccaaaaagaaaactctcctgggacccaaaagaggctccagaagaaagacacactttccccccacatcacagggtcccaaaccccacaacggtccagcacaggagttgcgatttgcctctatctcccagacacagagaagatgtgcgatttccagctcagggctcagcagaccccaaagccctagactatccccaatctcagccagtgaggatgagactggatgtcccaggagttgacaaaacatcaggcctttgctactgatgagtagaaatgtaaactttctggtcctgcctgagtctgcagggccagacgtttacatcttaactagatcctccctgagtaattcatacatgtgctaacatcgttacttagatttattttttgttttggtttggttttttggctttttaagatttttttattcattgaacgtaaatgcatacactgtagctatctttagacacatgagaagaaggtatcagatcccattacagatggttgtgagccaccgtggtggttgctgggaattgaacccaggacttttggaagagcagtccgtattcttaaccctatttaggattattttattttatgggtataaacattttgcctgcgtgcatagaagtacaccacatgcacagaggaggtcagagttgggcatcagagcccatggaactagagttacagagagccacgacgcaccgtgtgggtgctgggaaccgaaccggccttctctaccagagctacacgcactctgctcttaacccctgagccagttcttcagccccacatgctgaggcttaagaggtgtggatttctagtcaaagactcacttggggtttgagggggaaactatagtttcctgggctcctccgtctaagatgctgacccaaagggtctaaggtctgagagtctgcaagagaacagaagccccgggcaatgtcctgactgtgagatccggactgtgagctcatcaggtgcttccttcccccttaggtgtgcttctgccaagatgaggtcaccgatgactacatcggcgagaataccacggtggactacaccctgtacgagtcggtgtgcttcaagaaggatgtgcggaactttaaggcctggttcctgcctctcatgtattctgtcatctgcttcgtgggcctgctcggcaacgggctggtgatactgacgtacatctatttcaagaggctcaagaccatgacggatacctacctgctcaacctggccgtggcagacatccttttcctcctgattcttcccttctgggcctacagcgaagccaagtcctggatctttggcgtctacctgtgtaagggcatctttggcatctataagttaagcttcttcagcgggatgctgctgctcctatgcatcagcattgaccgctacgtagccatcgtccaggccgtgtcggctcatcgccaccgcgcccgcgtgcttctcatcagcaagctgtcctgtgtgggcatctggatgctggccctcttcctctccatcccggagctgctctacagcggcctccagaagaacagcggcgaggacacgctgagatgctcactggtcagtgcccaagtggaggccttgatcaccatccaagtggcccagatggtttttgggttcctagtgcctatgctggctatgagtttctgctacctcattatcatccgtaccttgctccaggcacgcaactttgagcggaacaaggccatcaaggtgatcattgccgtggtggtagtcttcatagtcttccagctgccctacaatggggtggtcctggctcagacggtggccaacttcaacatcaccaatagcagctgcgaaaccagcaagcagctcaacattgcctatgacgtcacctacagcctggcctccgtccgctgctgcgtcaaccctttcttgtatgccttcatcggcgtcaagttccgcagcgacctcttcaagctcttcaaggacttgggctgcctcagccaggaacggctccggcactggtcttcctgccggcatgtacggaacgcgtcggtgagcatggaggcggagaccaccacaaccttctccccgtagggggctcccctgcccggactacaaggacctctcccaggagccttaatgtggtgcacacatgcacagactctccatccaccgaattgctgctgagggaagagcaattctggccagtcaggttgacatgaggacctaagaaactgcttaaccccatcccacttataactacctcaaccaaagctgtaaaagatatggctgagaagttaacactcaagccaagacagctatccccaaaacgacagccaaaagtgaaagtgagaggctgccacactttccggagtgagggatgtggggccagtgaacaccctggttgagtagtcttcggaggcctctgaatgaacctgcttctagcttagagagatgtcccggagattcaaggacagagcttatctccacacttagcaagcaagcaagagatgacagtctctctaaatgctcccacagagcacccctgcccctcccttctgcctctccaccgcctttcctgaggtccaggccacaccatcagcctgaaggcagtcccagctggggctctggatggcaatgacaagtagttgggtctctatgatgggaataaaaaggtaggggaaaggtgacagaaaggagagaaggtgaccctgctggctgacagaggccagcaagctacttctttgttctctgtcagccactgatacctttcctcatgttctgcttttgattcatatatcttttatgaagaaacaaataaaaaaaaattttccctcgaggaaacaacttggaaagaagggaggaaattccttggttaaatggcgagtgagtgagttgtccccccattccacctgagagtcctgcgccccacacccctccgccccagccttcctttctcagcactcagaaccatgaggtcacagagcctctccggagatgcaaacccaggaggctgcaagaggtggaaaaagagcgaagacaggatgtctgtcttgcacatacacctgcagagcccgtgggatgggacctaggcccttacaggcagcagtatacataggagagcactctgagtatggaaagacgaggttgtcccaggaactcctgtgtctgggaactcagaggaaccccgggttggggggaaatggacacctgcatcctgttgtgtttgctgtaacaggatagcccggaaacagccctaactcttgtcaggccccttcagacttgcgtacattcctctaagaactccagtttggtgggaagctcagacagaggtcatgacattctagagtaagggaactagggactagtcagatgccacaggctggatgggactctgcagggtgtttgagagctaggaccactcggtcccctcctttctacccactagtaacagaagttactgttaccagcctgacccctaagtgcctctgtagtgcgagtctcagtccatccccgtttcctgtaacaaaacactgcggtctgcggaacttatacacaacaggaatctatctctcaccattctagaagtgagacaacttccactctagtatctcccaagtccatttataaggccttaaatccattcatcagggtggagccttcacggccagccagttatctctcaaccaccccaccctccaataccatcatccctagggttcaaattcaaacacaggcctattggagggacacacacattcaaaagacagcggtgtggaaagcagagggagagggccagactctgtcgcccctcactccatccccacaggccaagtgtccttgtcattgtgtcccagtgtctaaccaaagccctaatttccccaagcccgagagcttggtccaaactatgatacctgggcaaatgtccaatggcttagcacccgaatagctctgagcctggcggtaggatgggggtggggggtgggagagagaggtgagacattcacacaaaaacatagttccaatccccccccccccaagaaaaaagaaaaatggagcctgttccataacagtgctcattctctaagcttgtaaccacaaacacccattaccctcctccacaggatgcatggggctagaaagactttaacacaatttgtcaggcggcctcccggtctggaatcagcatcgtgggaggaacgaggctggctcaagtgcaggcagtggctggtggcgggtggcgggtggcgggcagctttcgggatgctggtactgaatattaaaaaggttcagttgcgactgtgtgaccacaagcacgctgcaagaaggcgatgccactggccacggtcatccccaaggggaacctgccagagtgcacgtggctttgtagatcctaatgaagttacagatgggaaaacagccctcgattcctaccagggaggaaataatggagggatcacggaaggggaagctgggccaaccacacaagcatgccaccctggcctcaaatacattgcgctagtataactggacatctccaaatatttacagaaacaacagaacccccagcaatgctaattccccaaactgctgtgtctcagaagttctatcctcagcttcacgctggcctgctgcctaagacctggcctgatgcactcttgtgcctaccaagggtgatccccaggatacaagaaagcaccctgcctgaagcccacccaggtcttctttctcattctgcccttctcgtctgctccatacaacagccccatgcctctaaatctgtgtcccttgccacgccatcattctgcaattgccccaagctccttccattccactaacagtcccttgtccacgccccccacgcccagtcccaactatgagtgtgtgtgtgtgtgtgtgagcgctcacacacacacacacacacacacacacacacacacacacatcagccctaactcagatcccccctggctgtgaccctaggccaaatgtaagacattcccaggtcatgaaactgccctttctgctagaagtgccgaacctttaataggttcctggagacctcaggaagcaggggctgacccctgtcgttctctagacagagcaaggagctggcttgtccaaagagacacagcaatgaggggaggttgcttaagctagctgtggagcctgagggtctggcagagttgccaaaaggggggatggagcctggcctactctgaatcccaaccctgccgctccccagctgtgtgaccttcagctgttgctcaactgctctgaatctcagatttctcaattgcaaaacaagggagatttgggtaaacacttagcacagagccagaatgttgagcgaggcagcagcaggggagctcccactccacagccagatggcctggttcatgtctccgctcccttacggtgcggtgcctcggtttccaaacctgcataatggagttattagtcgtgcctgcctcccaggattgaggtaaggaagcaattcatctacaaaagcaaaatatttagaaatacccgggcaagtgatatcatcttttgggagatagttgagaaattatagatttaaaacattgcagggatggagaggtgggtcaatggttagagcactggctgctcttccagaggacccaggttcagttcccagaatccacatggcagctattaacggtttgcaaatctagtgtcagataatgaggtacagtgccatgtatgtgtggggtacatgcctacatgcaggcaagacactcatacatataaaatgaaaataaatcttttgttttgttctgttttcattttttggaaacagtgtttctctgtagagtcctagcagtcctggaattgactctctagaagagaatggcctctaactcagagatccatctgcctctgtctcccaaaccctggggttaaaggtgtaggacaccacccaccggcataaataaatattaaaaaataaaataaaaatgtttctttaaagagacagagagagaaaaggcacaagagatggctcagtgggtagtgtttgttgtacatgaggccctgagtccagattcataacccacactcacaggccagggttggtgttgcggacgatgaagaaacagagatgctagagcctctggccaaccaagtctaacagaaagtagaagcttcaggcttcacaaagagacccccatctcaatagataagcaataagtaaatgatggagaacagaggcagacaccccagtgtctctctgccctccacctgcacacacacgaaggagagaaactcttgctaagttcaaggtcaccaccttcagttcctcagccctatgtctgttcacacgcaatccacaacaaactggaggacaccttagatgagagtctggtctccccacagggtggccaggagagacatttgaggcacaaggagaaggagatcacctgaggtctctaggggcctctctgatactcagaatcctaacgccctttaggtccaccctcaatccggtctgccagcatccatccttaatacgaacctctcttgcctgcagacagctcttgccttgataatgagtcttctttgagaacgaggtactcacttgcgggttttttgagtcaaggacagagtaggtaaggaagaaacaagcctatgagatggtgggaataaaggacagagtcggagaggagattctgaattcggaggaaggagcagggatgggggagctgtatattggagacgagacatggagagtatatccagtgggcagatgaatccgtgtgtgtgagtgagtgagtgtgtgtgtgtgtgtgtgtgtgtgtgtgtgtgtgtgtgtgtgtgtcctccctcaagtctcctagtctcacaggaagaaatgattccatgggtgtttgttcttttcaagggaaaggttagccggggtgtggtggcgcacgcctttaatcccagcacttgggaggcagaggcaggcggatttctgagttcgaggccagcctggtctacagagtgagttccaggacagccagggctacacagagaaaccatgtttcagggagggggaaggaggaagaaggtcaagtttccctacactgagtccctgaggactctcactctcaccccaacaggaacccagcttttccacacaccaggcatcccagccagggacacagatgaaggcactgtcaacagaagcaccagctagaacttctgtgatcctgaggtcacatggcccacaggttcctccctattctgatttgtatgtgacccgatcacatttccttgcagatgttaggtttaccccttcccttgtgcactttgaaaatggctactgccagcggggggcgtggtgccgcatgcctttaatcccagcactcagaaggcagaggccagctgatctctgtgattttgaggccagcctggcgtacatagtaaattccaagatgcccaggagaaaaaggaaggcagaagcaaatggctatcgctctattttgtctactgcccactgatcccacaaagttccctgaccaggctgttgtggcactgtgtcacaccacagtgaccccaccgagttctcatctcccagtgtgacctacgggtagtctgccctgaagtggatacccaagtcctctatcacgagggcaggagaggggacttctcaatccatgtcacagcttgcctaggacagtgtacgttatgtttgctctaaacaaatatcattgtgaagctgaacagatgttgcagataaaatgccctaaaccctttccctacgtttcaaagaagctgggaactcaggcgtgctagtcttggatggtttctgcatctgtggtccagtaactggcacgcgcaatctctcttgcaaaggcagaggtgaattcttctggccccgggggtgttttctgcagcctggctagctccagacctgtaattaagtctagtggtatgctggcaaggatgtggagaaagaggaacactcctccattgctgatgggattgcaagcttgtacaagcactctggaagtcagtctggcggttcctcagaaaattggacatcgtattaccggaagatccagcaatacctctgctgggcatatacccagaagatgttccaacagataataaggacacatgctccactatgttcatagcagccttatttataatagccagaagctagaaagaacccagatgtcccttaacagaggaatggatacagaaaatgtggtacatttacacaatggagtactactcagctattaaaaacaatttatgaaattcctaggcaaatagatggatctagaggatatcatcctgagtgaggtaacccaatcacaaaagaactcacttgatatgcactcactggtaagtggatattagcccagaagcttagaatacccgagatacaatttgcaaaacacaagaaaatcaagaagaaggaagaccaacgtgtggatacttcattcctccttagaatagggaacaaaatacccatggaaggagttacagagacaaagtttggagctaagacgaaaggatgtaccatccagagagtaccccacccggggatccatcccataatcagccaccaaacccagacactattgcatattgccagaaaggaccctgatatagctgtctcttgtgaggctaggtcagggcctggcaaacacagaagtggatgctcacagtcatctattgaatggaacacagggcccccaatggaggagctagagaaagtatccaaggagctgaaggggtctgcaaccctataggtggaacaacaatatgaactaaccagtaccccccagagctcgtgtctctagctgcatatgtagcagaagatggcctagtcggccatcattgggaagagaggccccttggtctttgcaaaccttggtacaggggaatgccagggccaggaagcgggagtgggtgggttggggagcagggcgggaggagggtatagggaactttcgggatagcatttgaaatgtaaataaagaaaatatctaataaaaaagtctagtggtggagaatcacccaagtgggaaccatctttgctcctgcactacagctctcacaggactggtagacatgccatcttgttcgagctaccacctctgtctaccacctaccctgcccgtcatgctctggctctgctgggttggccgttgacaatctctggactagaaagcctggtcagggaatgaacgcgatgagaactcgtgcctgctctaaccacagtctctctctccatcaccccagcagagccaaccctaagcagactacgaactagaagagcttccgagctttaggttaaacacagcagagcaggggaaacacaggaatcacgagggatcgggagggaggggaggttttgaggaagggaggaaggaaggatgtgctgacatttgcttagtgtccattctagggatccacctggcactgaatccacaagtgaggaagccaagggtgagagcaggctggtgtaactgactcatggtgacacagccagcagctgtgctaagattatattccctacttcatttatactgtgtattgaaaccttaccttattgaagtctgtcctgtctgtctgtctgtctgtctgtctctctctctctctgtttttttttttttttttttttttcgagacagggtttctctgtgtagccctggctgacctggcactcactttgtagaccaggctggcctcgaactcagaaatctgtctgcctctgcctccctcccaagtgctgggattaaaggcgtgcaccaccacacctagccttattgaagtgttttagcaatcctattgaaggcccattttacagatggggaagtaaagcccagagaggggaaagtgccaaagccataaggcaataaaactactaaaggatgtcagccagttctagctggcctccaaaggccaatttgcatctgccctcttgctgcaccatttaaccacatagttgcctactcttatcaaatccaatcaaatgcagctaggagctaggcactgtgctgggtgtacatagcatctctcaaagcacgctggatgcagagttctgtcctgggaggaggcacggtcgaatgagtaccgccttcagggagcagggaaacagcccggctgtgataggctgtccactccttcttcccactgggccctgcttctctctcaggccttcttgggcctcctggctctgccatggagccactgggcaacatgaacaagtcacctgtctgctgcagctcctctagagcaaaagaaagttcctagatggagtgagttttacacccatcccctgcggttctgaggtgccttgggcatattgactgggtggggtcagggagcccacatctcagggcatgttgacgcctggaaggggtgcaaagtgcctgggtgaggggctgaggaagctactccacccccagctgtggtttctggtggggccactggtggcagcaggtgaggggaagtatctgtcactcttccaacaaaggcaatcaaacaaaagcctcctggggcattgtgggaactgcagtaaaggcgccaaaaataaaacacaactttcctttgataggcactggtagctgcctgggggttgtgacaaaagtgttcagatttcacacctcagttcataccccaaacacacacacacacacacacacacacacacacacacaccagtctcacaaacaagtcatataataggcagtcaatgatcccagaagaaacatctccgtgggctgtgacacatgtcacaagaaccacatatgtgtcaaatggcttgtcctttccattttgaaatgttcaatattttaaaagaacttttaaatatcctattttatttcatgtatattggtttttgtctgcatctatgtctgtgtaccctaccattcacaaaggccagattagattccctggaactgggattatagacagttgtaaactgccaggtgtgtgcctggaatcaaacttgggtcctctgaaagagcaatcagtgcttttaaaatatatatacatatgtgtgtgtgtgtgtgtgtgtgtgtgtgtgtgtgtgtgtgtgtgtgtgtaaaatttattttatgtatatgagtacactgtcgctatcttcaggcataccagaagagggctttggatcctataacagagggttgtgagccacagtataattgctaggaattgaactcaaggcctctggaagaacagccagtgctcttgaccactgagccatctctccacccctaaagttttcagtatgttttaagcaaggagctgaacggggtattttgttctttgtccttcaagctacagaaccaaacttgctagcattcattcataaatattcatatgggcagtatgcctaaaaattataaaatactgataggcaaaagtgcatacattgcccacacagcgagaggaacagacacatagaccccccccccccacacacacacacacactggtactacaggggctcccctgtgtacacacactgcagtacaactgcttcccccataagggacattgacacccactcgaaaggcccagagagagctcaaccacaacccagtgacatgaatggattgacttagccagatcaaggcacctcgatggcactgaaaggaagggcttaatctcctttactgtatcttcaactgtcacagctggcctctctttcgggctatgggctcatccaccaacccttgcagcggagactaaggaaaaggagaccttggggagtagaggaatccttgggaggagaggttgggaggaggagaagaacattagccaaaaacagcaggctgggcgacaacggaggcgcctagtgaactggcctgagtggtggttctgaaagagcctgggggaggcgggggcaggtcttgaacccagacaagtccgagctcctgctctcacatgaacagccaatcccttgccccactcctctttctagctaggtggccttgggcacatggctgaacttgcttggcctcagtctccatctccacggaatgagaaagtattgtctgcatggcagggttgtgtggtgcatgtggaagttgcggcctcatcttctgggctctcccaacattcaacagtttgccttctttcccggccttgcaatccgactcttgcttcagaaactccagaccccctcattaacggcagaccttcagaatgtgtttatttcttgtctccccacccccaccccacttcccagccagatgcaagcatgggaggtggccgtagttcaaggcccaccctcccttcggggactttcaacgttcctcagttccttttgatcccatagctccagccacaagccaaacagcccccaaggcctccaaagttttctgcctgtgctctctacccctaaccccagtgctgcctgtaagaaaccgttccaggctctgcccagaagcccctccatcctgttaggtgataccagatgctcaaagagtgacccagaaaaacaattcttttcagctcattgtgatggtgcacatctgtaaccccaccacgctgaggaggctaagggagaaagagagaattctcggccagcctgggctacagatcaagaccctgtctcagaaaaattccaacaaaattgctgggaaatattgctcaaccatcggaatgcttacatagcatgcatgagtgcagcataaacttagcgtggtggttcaaggcctgcaatcccagcacttgggaagtgaaggccggggatcagaagttcaaggtcactctaggctacagggagagttcaagaccggactgggctatatgagattctcgtcctaatcaactcaagcaaacaagcaaacagacacacacaaactcacagtcacccacacg

SEQ ID NO: 2 - DNA, 1974 bp, Mus musculus
gccagagagggctagctggagagagacaagaaccaaaagcacagccttcctgtgtgatttctacagcccccagagcaccatggacccagggaaacccaggaaaaacgtgctggtggtggctctccttgtcattttccaggtgtgcttctgccaagatgaggtcaccgatgactacatcggcgagaataccacggtggactacaccctgtacgagtcggtgtgcttcaagaaggatgtgcggaactttaaggcctggttcctgcctctcatgtattctgtcatctgcttcgtgggcctgctcggcaacgggctggtgatactgacgtacatctatttcaagaggctcaagaccatgacggatacctacctgctcaacctggccgtggcagacatccttttcctcctgattcttcccttctgggcctacagcgaagccaagtcctggatctttggcgtctacctgtgtaagggcatctttggcatctataagttaagcttcttcagcgggatgctgctgctcctatgcatcagcattgaccgctacgtagccatcgtccaggccgtgtcggctcatcgccaccgcgcccgcgtgcttctcatcagcaagctgtcctgtgtgggcatctggatgctggccctcttcctctccatcccggagctgctctacagcggcctccagaagaacagcggcgaggacacgctgagatgctcactggtcagtgcccaagtggaggccttgatcaccatccaagtggcccagatggtttttgggttcctagtgcctatgctggctatgagtttctgctacctcattatcatccgtaccttgctccaggcacgcaactttgagcggaacaaggccatcaaggtgatcattgccgtggtggtagtcttcatagtcttccagctgccctacaatggggtggtcctggctcagacggtggccaacttcaacatcaccaatagcagctgcgaaaccagcaagcagctcaacattgcctatgacgtcacctacagcctggcctccgtccgctgctgcgtcaaccctttcttgtatgccttcatcggcgtcaagttccgcagcgacctcttcaagctcttcaaggacttgggctgcctcagccaggaacggctccggcactggtcttcctgccggcatgtacggaacgcgtcggtgagcatggaggcggagaccaccacaaccttctccccgtagggggctcccctgcccggactacaaggacctctcccaggagccttaatgtggtgcacacatgcacagactctccatccaccgaattgctgctgagggaagagcaattctggccagtcaggttgacatgaggacctaagaaactgcttaaccccatcccacttataactacctcaaccaaagctgtaaaagatatggctgagaagttaacactcaagccaagacagctatccccaaaacgacagccaaaagtgaaagtgagaggctgccacactttccggagtgagggatgtggggccagtgaacaccctggttgagtagtcttcggaggcctctgaatgaacctgcttctagcttagagagatgtcccggagattcaaggacagagcttatctccacacttagcaagcaagcaagagatgacagtctctctaaatgctcccacagagcacccctgcccctcccttctgcctctccaccgcctttcctgaggtccaggccacaccatcagcctgaaggcagtcccagctggggctctggatggcaatgacaagtagttgggtctctatgatgggaataaaaaggtaggggaaaggtgacagaaaggagagaaggtgaccctgctggctgacagaggccagcaagctacttctttgttctctgtcagccactgatacctttcctcatgttctgcttttgattcatatatcttttatgaagaaacaaataaaaaaaaattttccctcgaggaaacaacttgg

SEQ ID NO: 3 - protein, 374 aa, Mus musculus
MDPGKPRKNVLVVLVIFQVCFCQDEVTDDYIGENTTVDYTLYESVCFKKDVRNFKAWFLPLMYSVICFVGLLGNGLVILTYIYFKRLKTMTDTYLLNLAVADILFLLILPFWAYSEAKSWIFGVYLCKGIFGIYKLSFFSGMLLLLCISIDRYVAIVQAVSAHRHRARVLLISKLSCVGIWMLALFLSIPELKGLQKNSGEDTLRCSLVSAQVEALITIQVAQMVFGFLVPMLAMSFCYLIIIRTLLQARNFERNKAIKVIIAVVVVFIVFQLPYNGVVLAQTVANFNITNSSCETSKQLNIAYDVTYSLASVRCCVNPFLYAFIGVKFRSDLFKLFKDLGCLSQERLRHWSSCRHVRNASVSMEAETTTTFSP

SEQ ID NO: 4 - DNA, 31704 bp, Homo sapiens
aaaaatatatgaaacaaatattgacagaattgtcaaagaaataagagaaacacataaagcaagaaataagagaaacacataattcaacaataatagaaacttaaatatcctcctttcaataatagatacaacaactaagcagttgatcaacaagaaaacagaagatttgaacaatgctatgaaccaactagacctaacgtctatctataaaacaccacccaacaacagcagaatacatattcttctcagatatacatagaacattctccaggataggccatctgttaggacataaaacaagtctcaaaaaatgtaaaagaattgagatcagacaaagtctgttctctgaccacaaccagtaacagaaggaaatttgaagaatccataagtatgtggaaatgaatcaaggaactcaagggaaattagaaaatactttgaaatgaatgaaaatgaaaacacagcataccaaaacttatgagatgcagctaaaatagtgcttacagagaaattaatagctattaatgcctgtattttttaaaagaagaaagataccaaattaaaaaaaaacttttcactttaagaaaaagaatagtgaaccaagcccaaatcaagcagaaggaaggaaataataaagattagaatggaaaaaaatgaaatatggaattggaaaaactagagaaaaattaacaaacccaaaagttgttatatcaaaaagattgataagtttgataaacatttaactagacttaccctaatatcaaaaccacatacagatatcacaagaaaagtacagaccaatatctctcataagacacatataagatagatgcacaatttcttaacaaaatattaacatgccaaatccagaaacattacaaaaaaaattgtataccatgaccaagtgatttattccaggaattcaaggttggtttaatataaaaaaatcaattcatataatacaccatatttaatagaataaagggcaaaaacactcaattgtctcagtggacacaggaaaggcctccaactccctccatgtccctccaaaggacattatctcattcctttttatggctgcataatattccatgatgtatatgtagcacattttctttaaccaatctatcattgatgggcatttaggttgataccatgtctttactattgtgaatggtgctgcaataaacatacacgtgcatgtgtctttataatagaacaatttatattcctttgggtatatacccaggaatgggattgctgggtcaaatggtatttctgtctctaggtctttgaggaattctatactatcttccacaatggttgaactaatttacactcccaccaacagtgtaaaagcattcctttttctccacatcaccagcatctgttattttttgaatttttgataatagccattctgactggtataagagggtctctcactatggttttgatttgcatttctctaatgatcagtgtgttgagcttttcaaaatatgattctgggtcacatgtatgtcttcttttgtgaagtgtcttttcatgtccttggcccactttttaatttttttttcttgtaaatttgtttaagtttttatagatgctggatgttagactttcgtcagatgcatggtttgcaaaactttttttcccactgcgtaggttgtctgttcactctgttgatagtttcttttgctgtacagaagctctttagtttaagtagatcccttaatttacttatttgtcaatttttgtttttgttacaactgcttttggcatctttgtcatgaaatcttggcccgtgccttggtcctgaatggtattgcctaggttttcttctagggtttttatagtttttagttttacatttaagtctttaatccatcttgagttgatttttgtatatgctgtaaggaaggggtccagttccaattttctacatatggctagccagttatcccagcaccatttattaaataaggaatcctttcgctattgcttgtttttgtcacgtttgttgaagatcacgtagttgtaggagtgcagtcttatttctgggttctctattctgttccataagtctgtctgtttttgtatcagtaccatgctgttttggttactgtagccatgcagtataggttgaagtcaggtagcatgaggcctccagctttgttctttttgcttagggttggcttggctatttgggctcttttttggttccatgtgaatttttaaatagttttttctagttctgtgaagaatgtcaatggtagtttaatgggaatagcattgaatctataaattgctttgggcagtattgtcatttccacaatactgattcttcctatccatgaacacggaatgtttttccatttgtttccattatttctaatttctttgagcagtggtttgtagttctccttgtagatgtccttcacttcccttgttagctgtattcctaggtattttattctttttgtggcaattgtgaattggagttcatgcgtgctttggctctctgcttgcctgtttttggtgtataggaatgctagcaatttttgcacactgattttgtatcctgagaatttgctgaacttgcttatcagctgaagaaacttttcggctgagacagtggggttttctagatataggatcatgtcatctgcaaacaggaatagtttcacttcctctcttcctatttgagtacactttattcctttctcttccctgaatatgactgccctggccagaacttccaatactgtgttgaataggagtgatgagagagagcaaccttgtcttgtcctgattttcaaggggcttacttccagcttttgcccattcagtataatattgtctgtgagtctgtcatatatggctcttattattttgaggtatattccttcaacacctactttattaagagtttttaacatgaaggggtattgaattttatcaaaggccttttctgcatctatggagataatcatgtggtttttgtctttagttctgtttatgtgatgagtcacatttattgatttgcatatgttgaaccaaccttgcatcccaggggatgatgaagccaaatttgatcatggtggataaactttttgatgtgctgctggattcggtttgccagtattttgttgaggatttttgctcaatgttcatcaaggataatggcctgaagttttctttttttgttatatttctgccaggttttggtatcaggatgatgctggcctcacagaatgagttaggaaggagtctctccttttcaatttttttgagtagtttccgtaggaatggtactcttttctgtacatctggtggaattcagctgtgaatccatctggtcctggactttttttggttggtaggctgtttattactgcctcagtttcagaactcgttttcagtctgttctgggattcaatttcttcttggtttggtcttgggagggtgtatgtgtccagaaatgtatccatttcttctagattttctatgcacatagaggtgtttatgatattctctggtggttgtttgtatttctgtgaggtcagtggtaatatctcccttatcatttctgattgtatttatttgagttgtctcttcttcttctttattagtctaactaacagtctatctattttattaacttttttgaaaaaccagcctggattcattgatattttgaatggttttttttttatgtctctatctcctttgattcagctctgattttggtcatttcttgtcttctgctagctttgggacttctttgcccttggttctctagttcttttagttgtgatgttaggttgttaacttgagatctttctagctttttgatgtgggcatttagtgctataaatttactccttaatactgccttagctgtgtcccagagattctggtatgttgtatctttgttctcattagtttcaaagaactgcttgatttctcccttaatttcatgatttacccaaaagtccttcaggagcaggttgttcaatttccatgtagttgtgttgttttgagtgaatttcttagtcttgagttctaatttgattgtgttgttgcccaagagactgtttgttatgatttcagttcctttgtatttgctgaggagtattttacttccgattatgtgatcaattttagagtaagtgccgtgtggtgattagaagaatgtatattctgttgtttgggaatggagagttctatagagatctatcaggtccatatattccagagctgagttcaggtcctgaatatctttgttaattttctctctcaatgatctgtctaatggggtgttaaaacctcccactattattgtgtgggagtctaagtctatttgaaggtctttttgagcctatgtctgtctttgcatgtgagatggatctcttgcagatagcataccaatgggtcttggttttttatccagcttgccactctgtgtcttttaattggggcatttagcccatttacacttaagattagtattgttatgtgtggattcaatcctgtcatcatgatgctagctggttattttgcagacttgtttatgcggttgcttcatagtgtcactggtctgtgtacttcagtgtattcttgtagtggctgataacagtttttcttttccatatttagtgcttccttcaggagttcttgtaaggcaggtctggtggtaatgaattccctcaacatttgcttgtcctgaaaggatcttatttctccttcgcttatgaagcttagtttggctggatatgaaattctgtattggaatttctttcctttaagaatgttgaatattggcccccaatctcctctggcttgtagggtttccactgagaggtctgctgttagtctgatgggcttccctttgtaggtgacctagcctttctctctggctgcccttaacattttttctttcatttctaccttggagaatctgatgatcatgtgtcctgggaatgatcttctcatggagtatctcactggggttctctgcatttcctgaatttgaatgtttgcttgtctagctaggttggggaagttctcctggaaaatatcctgaaatatgttttccaaattgtttccactctccccatctctttcagataccccaatcagtcatagattccgtctctttacataatcccatatttcttggaggttttattcattccttatcattctttttctctattcttatctgcccgtattatttcataaagacagtcttcaagctctgagattctttcagaggaagaatctttcagaggaagactaagcagaacttggcctattcttctatgaatacttctgattgcattgtgaagttcttgtagtgtgtttttcagctcgatcaggtcagttatgttcttctctataatatctattttggctgtcagctcctgcattgttttatcatgatttttagcttccttgcattgggttacaacttgcttctttagctcagcgacgttcatttttatccacattctgaagtctacttctttcattgcagtgatcttagccttaccccagttccaaacccttgctggagagatgctgcagtcatttggaaggaagaaggcactttggctttttgagtttttagtgtttttatgctgattctttctcatctttgtgggcttatctacctttgatttttgaggttgctgacctttggatggggttttggggtttcttttgtttttcttttaacaatctggccacttttccataaagctgctgtggcttgctgagggtcccctccagactctagtcactttggattttccagtacctggaggtatcaccagtgaaggctgtgaaacagcaaaaatggcaacctgccccttcccctgggagctccatcccagggaggtatgaacctattgctggcctaaacacacctgtaggagatggccggagaccccatttgggaggtctcacccagtcaggaggaacaggattggggagccactgaaagaagcaatctaaccacacttccgaagagaaactatgctatgctgggcaccacttgcatccccagttggcttgggatctccaaagcctggagactggtgtggctaagtcgccaaaacagcaaagatggcagcctgcccctcccccgaggagctctgtcccaggaagtcttcaaatctctgtcagccagagaacatcgacaggagtggctggaggccacagttgggaggtcctgcccagtgagaaggaatggattagggaccctcttaaagaagcagtctggccatattttggtaaagcagctgtgccacgttgggagatcctttcagcccccagttggtttgagctccccaaagctgaaaggctggaatggctgggatgcccaaacagcaaaggtggcagccctctccaccatccaggcaccctgtcccagggagagatcaaaattttatgggctgtagaaaatgggcagaggtggctgaaggccttgtttgggaagacccacccagtgaggaggaatggataggagtcctgcttaaaaaaacagtctggccacgttttggcagagcagctgtgctgtgctgggggatcctttccacacctggtgggtttggactctccaaagtctacaggctggaacagctgagtcgtccaaacagcaaaggtggtgcccctcacccccaccccagccacccccagaactccaccttgtctcaggtaggtgctacactgttgcccgtggctggctggaattccaagccagttggtcttatctggtgaggtgctgtggaagtgaggcccacagaccaatgctgctcagctccctggattcagcctccttcctaggggtatgtacagacctcctgccttgcctgaatggcggtcacctttgctggggttccggagcctgagtatgtaaagctcctgggtgtctgtgcatgcctgagcagctgctctgccaataatccaatgcagctctgtgtgtaagacccaaaggcctggtggagtgggttcacaggggatctcccgatccaaaggttgcaaagatcggtgggagaagcatcattccccaggtttgcacattcactcaccacttccctggtggggggaggggagggggtttcctttgggtctgtgttgctcctatgtaggccattgccctgccctgctttcctctatcctctgtgggtcgagctgattccttaatcagtcccaatgcaagtatctggatgtttcagataaaggttttgaagtacccacccctttgttcctctctgagagagccatgccccatacctgcttctagttggccatctttgaaaataaaattaagaaaacaatttcatttacaagcacatcaaaaagagtaaaatacttaagaaaaaatttaacaaagaagtgaaagacttgcagcctaaaaagtataaagaaattaaggaagacctaaataaatgaaaaaaatcccatgttcatggaccaaaagactttgttagaatggcaatactccctaaattgatttacagattcaatgaaattcctattagaatcccagctggtttcattgcagaaattgataacctaaaattcatatggaaaagagagagatgcagattagtcaaacaatgtttaaaaagacagataaagttggagcagtcacaactcccaatttcaaaatttgctataaagctacagtaatcgagacagtgtggtactgtcataggacagacacagagattgataaaatagaattgatagtctagaaataaaccattacatttatgatgaattgatttccaacagaggtgctaagacagttcaatggtggaaaaaatagtcttttcaacaaatgatgctgggaaaactagatatccatataaaaaatgaagctggatccctacctcacaccatatgcaacaattagctcaaaatggatcagatctaaatgttgcagctaaaactataaaagtcttaaaagaacatatacgaataaatctttgtatacttgaattatgcaatggtttcttagatatggcaccaaagacacaattgacaaaagaaaaataaatcaattgaacctccacatttaaaactttgcgcttcttttgccagagattcaggttttaaaaaacaaaaagcctttgtgcttcaaaggacgctatcaagaaagtgaaaagatgatccatagtaagggagaaaatatttacagatatgtatcagataagggattgtaaccagaatatataaagaagtcttacaactcaataataaaaaataaataacccaattttttaaatgggcaaaggatttgaatagaaatttctcaaaaaataatacaaatggtcaataagagcatgaaaagatgctcagcataggtagtcattaggaaaacgcatatcaaaactacaaagaggccgggcatggtggctcatgcctgcaatcccagcactttgggaggccgaggctggcagatcaccttaggttaggagtttgagaccagcttggccaacatggtgaaaccccgtttctactaaaaatacaaaaattagccaggcatggtggcacgtgcctgtagtcccagctacttgggaggctgaggcaggagaatcacttgaacccaggaggtggagactgcagtaagccaagatcgtgccactgcactccagcctgtgcaacagagtaagactccatctccaaaaaaaaaaaagaaaaaagaaaaaaaacacaatgagataccactttacagccactaggatggctagaatcaaaagaatggacaatagtaagttttgttgacaatgtggaaccctcacgcattgttgatgggaacaaaatggtgtagtcactttggaaaacagtttgatagttcgtcaaaatgttaaatatataattaccatatgactcaacaatttcacttctaggtatatacccaagagaaataaagcatatgtccacacaaacacttgcacataaatatttatagcagcatcattcataatagctaaaagggaaaacagcccaaacatccaactgatgacagacaaacaaaatgtggcatatccatacaatggaatgttattcagccataaaaaggaatggggaatggatccataccaccacataggtaaccttgaaaacactaactgaaagaagccagatgtgaaggtcacatattgatacttctatttatgtgaaatgttcagaataggaaaatctatagagccagaaagtagatttgtggttgccaggggctttcgatgacaggaggggaggggagcagtcattgctagtgattacagggttcttgagagggagtgagaaaaaatgttctaaaatgtattgtggtgatggttgcataactctgtgaacatacaaaaaccattgaattctatactttaaaaaggtaaattttatgggatgtggattatagctcaataaagctgtcattaagaaaggaaaaggaagggaggggagaagagggaaaggggagggaggggaggggaggggaaggggggagaaaaaagatacatcgtggcatatctcttcccttttacctgtcattatgtgtcagtgcctcccattggcctaaactacccagaagccagagggaaagccatttgggactatattccactgtgacactgagcagagcaagggaaggatggggacacttctctcacacatctctgactccccaacatctaacccatggcctggcatgtgatattcatgctataaatatttgttgaatcagtaaatggcccctcatctagattctgccaggcagcgcagggggctttttgaatgtaaatgacctaatgattcaggatcctatgaccagcgactgtcaccctctgtcacctttcttctgcccctttatctctgaaggcattgaaggggccctgcatgagtcagggagggctggggggaggagcaagggtgggaggggcagggaagagggtggcttctccgacaacttaaaaggggcttgaaccacttcctccccagacaggggtagtgcgaggccgggcacagccttcctgtgtggttttaccgcccagagagcgtcatggacctgggtgagtgagcctcttcatgtgagaaggaacagtaccagggtcttggacacccagactgaccctgtggaatgggggtggaggatgcgggtggagcgcataggggtgcttcctggagaaatcagttctgatttggtgggcattggaagctacttccagagaatgccccctgctgtcccaggaggggtgcacctgccctttcagacctggagaaggggtcagcctttggtgccagtggggacaagggaggggccgagatcatgtctttctaaaacagcagggacataagagagtggcggggctgggcttggtggtctggcagaacctgttctcatcatgagggtgataggttaggccctctgggacctctggggacaggtttcaacagagaaattctccctagagagcttaggaccttttacccactctctgattcccacctttctcccctgccaaatattcatatacctgtccacttggggtcatgaggagatgcaaatgaaacgtgactgggttgtgagaatggtgcggtgcattgcaaatgcaagctctggttgctttctctctgctgcacatcccacctgctttgatctggctttgctgttgcctcttgcaagttaaggaacgggcaggcaacatggaatgggatggcaaggggcactcagcttggagaaatcatagccaggccttcagcacagcccctgcccctgagcaaacctcacgcactctgccccggcagataactctactctttagaaagccctttctcaggtctaacctagaaggggtcaaggggaagcactgagggtgttctgagtggttcatccagctccagacgccccctttataaatctcagctgtggagtcagaccaggctgaggctaagaagaccaggttcctagatggcttgtctcaccagcaaacaatgcaccacggcggcctcaaagccgcaaagggttggctttaaaaagtgaaggttccctggtgctgtcctcacacccctcctcgccacaccacagcctccttgatttcatctcttactttcccgcctgccctgaacgctggatctggacccagcaaacagctgtgaaagggttaaagtggtcaccccacccactgactgtgaactcctgaaaggcaggttcaggtgctttgaggatgtgaggagaaaatgtctgcggaatgaatgaatacaccgtatcaagaactccgtagagtttagtttttgaaaatctcttccaaatgcctcatttcccagccaatctacccttaaatcccactcccctgcaccccctccaccaccccccatcacaatcccacagtacagacgtcacccacagaagaccctgctccagcctttcatactggcctccaggaaggaaaccaagcagtgcccagtggtgtgctactgggcatttgaaaagcagctccccggggtggagcactggtagctgactccagggtggagggaaagtcctgaatttgtagtgcttgccaatttccatggtgtaaattctcccaccctggctgattgatttcaagccatctacatgactgaacagggggttgggaagatgtgcagagtgtcttaccccagactaggtttaggggtgctagactcctaggctttgatgcagggagagagggtaatctctggtccaggaagaagggatattcttgccacttcactcaacttgagagagccccaacggtcaaacccgaaatactggtaggaggggaagccgctgacaagctttactcaaaacgggctctctgggccgttgatggggtgggtgggccttggaggatctgttgttctgctcttcatctgcccagcaaggagcaagaggtgggtgaggagggagggtttctgttacacaaaatgaaaactcccaagcagggctgagctggcctttttcacggtttgaatgagcagctctgaggcaccctccccaccttcgagcaatgagaccgaagatctttcataattctcaaaagcaaagcaaggaaaaaatgaacccatgagagatgtgtgcctcacagctcggacataaatggtggcaaagggggatgctgaagctaattcagggccagtttcttgcctgccagaaacttggctggggaggagaggaacgctgcagcctggggtcgctgttggaaaaaatctctcctctttgcttcggacattcaggcaactctcattgtttgagggattcagggatgaccagtctggtggggagagtgacacatatgtcacaaagccactgcaacagaataagatacagcattgaccagggcaagggcaagacaagaagggaatagtgaacctgggtcagagaggtatttaaggtgggttttcaagggtgtgtaggagttgtcaagcccaacaaggagctgcaatgggcccaggatgtggcaggaatggcaaactccattgccatcagaggccgacaaggtaatagagggaatgggcataaggtgcaggaagtggaggggagtagagtgacccagagggtgcatgccccacctaaaggcattcaaatctattatttcaaaaactccatgctgacaagcagagtgtcctggggactaaggctgcagccgtgtagatggtcagctgagacaacagtaacagagacaagaaagaagcaagcggaggggagggtggagtagctggccatgccaaggaggaagatgaggaggaaggacgcaggcacaggagacccaatccttaaaacgtggtacggcatccctaaggaatttgaactttatcctgaaaacaatggggacccatcaaagatttttatttttcaagtaggtgaattaaaggatgagatttgtgttttggaaggagttctgtggcagcaaagaggcagcaaagcccgtgtcagaacagaggtggggccggctcttttgggggccgggatgttgggggatggaagcaggaagcactggtggccagtggggcatggggagcaaagattcccctcatgctccgtggagcgtcctagatgcagcaggctcatcagaaacacagcctgatgcagtagccagagcccaaaccttgctatcctgttcaaatctcaggtccctctcttagcagctgtgtggccccaggcatttggcttaatctctctgggcctctattttctggaatctaagatgaggatcaccagggtagctcatgagatgttatgagggagagacacatacagacccagtggccgcacagaaggatggttaggagtgtggttgctggagttggagggtttcaaagcctgctcccctgctggccattgtgtgactctgagaaagttacttgctgtgtttcagtttctcattggtaaatggggataatagtagcgcctacctcatggggcttttgagaggatgaaatgagaccatacatgcagacagtgtggcacgcagtgagagctcagtgaatatgaattatctcattggatacagcagttgataacatagaaaatgcaaggtctaccaggctctcacccatccctgcctactgtctgaaagtggattccccagatctctagacctctcaccacctccctgcttctcctctgcctcccttatccaaaaaaaaagagagagagagaaaagttgtgttggcaggtgaggaagttcaaagaggaaaaagcttggggtcgctcttggggcgagctgattgggcaactgtgatttcctgggcagtctggaggacctggaaaaatgtggggatggaagttcatggtttggagatgggggcagccagccaataattttctttcctggatgggcagtctctcatgttgggggctccggttggagttctagggaattttcatgatgatcattactgaaaactcaagaactcagaaaacacccaacatctaggtcaaccactccttagccccagagattcccaacttcattggtctcactgaagctgctgcccaagaccagtttctttatgactttgtaacagacagggatgatctgactcaaggccactgaccaggctcccttttgccacatacaagagttcccctaagtttccctgtgatgtttcttgaaagccacctgttttggacctacaagacccttgctcatccacctcctccaaaacacctggaatgagaaatcacaggcacacacgccagcactcccccaactcccctcccctgacgggaacagcaggagtgggacagcgtccgggagaaggggttatcaacagagttcaacagaaacacagttcttgctcctcagatctcacccgttgtgacttatcaaaactttgaggtttctcatttctccctgacagtcagagcgggctttctctagagtaaccgaaagacacttacgtgttttaaagaaacctcgagactcgacctctagatgagtcagtggagggcgggtggagcgttgaaccgtgaagagtgtggttgggcgtaaacgtggacttaaactcaggagctaaggggtaattcagtgaaaaaggggaatgagcggtggggagctctgttgcaacagggtccaatcgcagcaggactacaaatgcccgagcgcaggctgggaacgaggggacagcggctgcctgtccccagaatagaaaatgcagctaggaagccctctttgagtggacagcggaggactggactgccaggccaagcatcaggggcttcatcctcagggccggttagagcccctgaggatttaggaggaaggtgaggtggggactgccatcagagctaagctttaggcagatgtgtctagcagtagtgtgcaggactatttgctcaaggcgggagaaatacctatttatttatgtagcccgatgcagtctctccttcccggaggaactcccaagcccagaatccctggctttacacaatttccggggaacacattaaccaactgcaacctgggtgccatgcagggaggcttccagcaggtggtgctgtggccaaggacacggaagcgctgggctctcactgcttccccagcctccaggagaaggtgccttaaacaggttcccacgcatttcctggcgctattgagcttggagctgccaagggcctgccttcacttgtggcatcgcagttactgactctccagtgggccaggccctacctagctgggacctgagggtcaggatacgggaagagggctactgccgccctgacttgtaggtaagctaaaacatctaggcaaattactctgtcaactgtcctccctgctcagcctcaggaagaaataagttcctgctgggccccaggctcagccacaaaaccagactgagcacatctgggccttgtgctacaccggggtccccatcagctgctcagaccccaggaagcctcctgacttccagaacacgtcgcttcccaaagctgaccctgttccccctttcacctgccccccaagcctaagttagaaaacaagttaaaggagagaaagtgtgtgcaggcacttcagttaagcaaaaaaataaagaagtcgtgacatcaggaaagagcgtccttcccccacactgcaacaggacagcatcccttctgtgtcctctcgggccatcttgatgccctctcccttggaaaaaggacaggcattcgtttacttgtcattcatgtatttattcatcattcatgtatttatcattcatatattcatcagcacacaattgtggggcacctcctcaattctgggcctgcacaagataaaagggaagggatctctgtcccaaaggcaggccaagggtgtgcgcccagtggaccaacagtcagtgctgaatgaatgtcatttcagtgagggggtgttgtggagctggtggagccctgaggcagtctccatcgctgtggaccagtaaggaacctcatccctctacccagcctgtgaggtcatcctccttcctcagcccacctccctcaggagacactcaggcttggcttcatgcacgtgtggctgcgcactcacctggatgccaggaaaatgctcctgggccagtggctaccagcaccaaagcagggctggaaacgtgtgcacctaccccacgacctcatagctttgccgcctcatcccacatcaggtggagtgggagggggcactcagacccaccaaccaagctcagtcttgaggggtggtctgggctagagaagacttcccagctccaagaagcagcccagatgggccaagacagggggtgggaggggctgccctgcattctgatgctgcttctttccaggacctgggagtggaggaggacaagaaggaggtgaggacagtgatgccgggcagcaggccaggtgttcaaaggcacaatctggttctgatgttctctttcagcaaacacagtgcctggagcttgggaggaaagttcccaacagcgtctccccctccactgctttctttaataacaaagacttgtccctgccaagcaataactttctcgccttgtctcctacagggaaaccaatgaaaagcgtgctggtggtggctctccttgtcattttccaggtgaggttctctgccaaggaaagctctgttcccttctccacacggcctcccaagtcaggggtttagtggaggagctgggcatttgctagaagatacaagacccagacataagcccgcctgccactcattaagctaatggctgccccctcaccatctgctgagtgaccctggagagccacagatgttctctggacttcctttactccatttaggttaaaacatgggggaaaataacttaccaccttccctatcccacctccaatctccctgcccaggagacagaaatatggactctgagttcttagagagagaagagctgcaaaaagcaaaaaatgttactgggttttgtgcacgtgtgctgagaaaatcaccctggatctggcgatcttgttactatcctatcgccccaaagttgtctctttccaaccttcacccaaaggcttccctcgcagcccccgttttctttggtgaaatagagacccatccggcctccctggcaggggagggaagagaggatggggccctagggatggggagaggggtggatgagcacacactttatagcaggcctgaactcggcaggaacaaagaccctcactttacaaagttctgtttctccatccagaaacagacagaaagtgtgcctcaccaagtgccaaagttagaagaaactgtaactcgcagagtcaactttctcccatttgttagaggtgggagctcagagtaggggtaggggagtccaactgaggccagagctagagaggcagtgcttcagaattcggctcatccccaggtctggaggccagaggggcagctttccagaagctcaggccagaggcaggccccaagctgggcactgttcccaaaaccccatcccagaggccccccggagcctgggctgcagcccatagcctggcccccttccccatcaccactccctcctctctctcccctgtctccaggactctggggggctgtattgctggcagtggaggctggaagggtgggaaggggaggaggacagctgaggctcattcttccctttcacttggggagggggtgctcagatagggcaggatgtggtggggctgtgggctgcagaggcagtgaggctaggggagggagaattataaaacaggaacaaggttcaaggggagaagggaaggcaggactggatgatgcagagtgcacttcatagaggccgggagtactgccctccaggaaggctgagaccccctcatgtccagggaccccgggtctaaggccttgggccgtaaccatggctgggccaaaggcagcagcctccttcagggctcccaggctgcagccatgcccaggaaagggaagaggggttgccactgacttttcgtctcaggctagcaatggccaaagaaaaggctcctggacatcattttgtcctcaccatgttcccaagcaggacagtgatgaatccagaacttgggtgtgaaaaagagatagagacaagatgcggtgaatccctccagcataaatggatagaaacccaccgtcgctgagctgctgaatctggttcctggtgatagaaccatgagcctcgtgaggcaggtcctccagcccagctccctgccctgcacaaacccgtccatcgctgtgcgcagaggcaggggcaggcatggaccccctccttcattgataaaatcacagcaggctgctgaaccttcacccgaccctgcagacggctaaaaaaagctccagcagctgagtcctgctgattgggatctgccggaagagatgcgaggaagagagaggcagagaggtggggggagagggcgggagcacagagggagagtgggagatgagagctgcgcttccttccagggacacagctgctgaggagtcctcgcccccacccccatggcccatcatccattcacggagtttatggcacttgggctcacgttgcctgagctcctgctgggtgctaagaggggacccaggatctagagtctctccaggtcacccaccacccatgatcacagcagtttgccccaaacccaaggcttcatggcctcaaaatgggagcatttgccttcctctcttcttactccaggccctcctcaaccttgacccccaggtggattttccccctaaagctgaggtcttttgtaagccccctggaaaactccaccaagttctaaaggagggtcaagaagaaagacacatgttccctctctcacggagcttccagggggcaaaattaaagctccatggagaggaaatggtgctggagcctgggctaggtacctcacagcaaccatgggaagcaaataggattcatctccatttcacagaagagaaaactgaggctctgagagagagagagagagacagaaagagtttaaccagctcaaggctcatctggccccagagcccagctgatttccagtcccctgtcagcacatgtagagtctctcagacttggcaaaatcagccacttgctacttactagcagaactgtagaatctcaggccccaccttagcctactgattcaggatagacatgttcacaggattaatcaggtgatgcgtattggagttaaaatttgagaagcactgatttaaaaccaaagaatcacctggagactttaggaaaacacagattcctagacccatcacttgagattctggttcagaattctcaggtggggcctgagaatttgcattcctaacaagttcccaggtgatgctatgatactgatgatgcggacctcacgatgaaaccactattcctcccgcctgggcaacatggcagaatcccatctctactaaaaatacaaaaattcgctgggtgtggtggcataaggctgtggtcccagctactcaggaggctgaagtggaaggatcacctgagcctggagaggccgaggctgcagggagccatgattgcaccactgcactccagcctgggcaacagagtgagaccatgtctcaagaaaaaaaaaaaagaaagaaaccactgctctaggctaaatcccagccagagttggagccacccagctaaactggcctgttttccctcatttccttccccgaaggtatgcctgtgtcaagatgaggtcacggacgattacatcggagacaacaccacagtggactacactttgttcgagtctttgtgctccaagaaggacgtgcggaactttaaagcctggttcctccctatcatgtactccatcatttgtttcgtgggcctactgggcaatgggctggtcgtgttgacctatatctatttcaagaggctcaagaccatgaccgatacctacctgctcaacctggcggtggcagacatcctcttcctcctgacccttcccttctgggcctacagcgcggccaagtcctgggtcttcggtgtccacttttgcaagctcatctttgccatctacaagatgagcttcttcagtggcatgctcctacttctttgcatcagcattgaccgctacgtggccatcgtccaggctgtctcagctcaccgccaccgtgcccgcgtccttctcatcagcaagctgtcctgtgtgggcatctggatactagccacagtgctctccatcccagagctcctgtacagtgacctccagaggagcagcagtgagcaagcgatgcgatgctctctcatcacagagcatgtggaggcctttatcaccatccaggtggcccagatggtgatcggctttctggtccccctgctggccatgagcttctgttaccttgtcatcatccgcaccctgctccaggcacgcaactttgagcgcaacaaggccatcaaggtgatcatcgctgtggtcgtggtcttcatagtcttccagctgccctacaatggggtggtcctggcccagacggtggccaacttcaacatcaccagtagcacctgtgagctcagtaagcaactcaacatcgcctacgacgtcacctacagcctggcctgcgtccgctgctgcgtcaaccctttcttgtacgccttcatcggcgtcaagttccgcaacgatctcttcaagctcttcaaggacctgggctgcctcagccaggagcagctccggcagtggtcttcctgtcggcacatccggcgctcctccatgagtgtggaggccgagaccaccaccaccttctccccataggcgactcttctgcctggactagagggacctctcccagggtccctggggtggggatagggagcagatgcaatgactcaggacatccccccgccaaaagctgctcagggaaaagcagctctcccctcagagtgcaagcccctgctccagaagatagcttcaccccaatcccagctacctcaaccaatgccaaaaaaagacagggctgataagctaacaccagacagacaacactgggaaacagaggctattgtcccctaaaccaaaaactgaaagtgaaagtccagaaactgttcccacctgctggagtgaaggggccaaggagggtgagtgcaaggggcgtgggagtggcctgaagagtcctctgaatgaaccttctggcctcccacagactcaaatgctcagaccagctcttccgaaaaccaggccttatctccaagaccagagatagtggggagacttcttggcttggtgaggaaaagcggacatcagctggtcaaacaaactctctgaacccctccctccatcgttttcttcactgtcctccaagccagcgggaatggcagctgccacgccgccctaaaagcacactcatcccctcacttgccgcgtcgccctcccaggctctcaacaggggagagtgtggtgtttcctgcaggccaggccagctgcctccgcgtgatcaaagccacactctgggctccagagtggggatgacatgcactcagctcttggctccactgggatgggaggagaggacaagggaaatgtcaggggcggggagggtgacagtggccgcccaaggcccacgagcttgttctttgttctttgtcacagggactgaaaacctctcctcatgttctgctttcgattcgttaagagagcaacattttacccacacacagataaagttttcccttgaggaaacaacagctttaaaagaaaaagaaaaaaaaagtctttggtaaatggcaaatgagcgtgtctttgttttgcaatcccccacaccccacctgaccgtcccctctcccctcctccctgccctctcccaggcctcgtttcttagagacgctcagaaccacaaagttgctcaggaatgctctgagcccgtctggtgacacaggaccaagaggctgaaaggtagaaggaagatgaggacaggaggtccatcttgcaaatacccttccagagttcaagggataggccccaagcctgcacagtcagcactgaaccggacatgctgatcctactgcagctttgggaaggccaacttttccgggtaacctcgatacctggggactctgcatttagcagctcttgcacagtagcctgctcacctgtcccagctcagaccagaactagagcccttaaccttttgtcagccccttagactctgaaagctggggtttggagggagggcctttctgtgggcttggagaccacagcatactggactaggggtcagggatgagaccctttgctggcatgagagctggaaccacccatgatcctctctgctagccactgtagcagcagtggcctccgtggtgtatgtcatagtcccttcctgctggtacaacaaaatgccaccgatggagtaatttacaaaccatagaaatgtatttctcacagttttagaggattggaagtccaagatcaagacgccaacagattcagtgtctggtgtggactctctctgcttccgagatggggccttgccatgccctctggaggggacaaacactgtgtcctcatgtggtagaagagtggaagatcacaatgagcctaactagttccctcctgctcttttattgctataagggcattaatcccgttcacaagggtggagccttcatgacctaatcaactcccaaaggccccccccaacttctcataccattgccttggggtttatgttccaaccatatgaatgtcggaaagatacatacattcaaaccatagtgtggatactgactgtggaggagcagggagagagggacagacaaaggcccccacacaggccaggtgtccgtgtcatttcgtgccttggtgccacccagagccgtgacttctgcaagccagagagcaggtcagtccaacctacaatgcgtcaagaggggtctgaaggacccagagctgcaatagctctgggccgtggggagctagagggagggctgaggcactcacgcaataggtgattccatccatttccccaagtggaaagagcctcgttgaaaatggagctgcctggtaatgacacccattcgctcatctcgcaagcacgtgacattaccctcctccgagagatgcactgggctggaaggtttttaacaagatttgtcagctggtctccaagccgggaattggcgccctgagaggaatgagcctggcacggatgcagtcagcgtggagcggcgtttgcagcaatggcattaaatattaaaaggcacagctgcgactgtgtgcgtgagcgtgtggccagggggcaatgccagtgtgcgtgtgtgtccccgaggggaacctgccggagcgcatgtgcgtgtggagcccgctggtgtggacatcctaatgaggttacagatgggaaaacaaccctcggttcctgaaggggaagaatgtaacagagcagtcatgcaaaaggcagccaggccagccgcacaaatgcgccccctcagctgcagatacatttttctagaataactggacatctccaaatatttacagagaaaacaaaacccccagcaatgtcaattccctcgaactgctgtgtctcagaagttctgacctcggttcagtgctggcctgatccctgctcccttgcccgaggctctcatgtgcccatcttgagcttggggtgacccctgggaagaaggaaaaggccccctgggaggcccacccagggcttctctcttcttttcttacctgcttcatacatctgaaccctcttcccaggttcacagccaataagccttctccagtcacctgaaatttccttttcatttcatccccaggccctcatctccctcatccttgctggctgcaaccccaagccaagcccaaggtattcccaggccacaggtcttccctttcagctagaagcaccacacctttctcatcacagactcacagagctccaagggacctcaaagatcagctgggccaatcccccagtcattttctagatggtgaaactgaggcccagcggggagaagctgacttgcctgaagaggcgtggcaatgcagggatattggttaaacttgctttggaagcctgagcgtctggcagggttgcaggagggtgtgggggagagcagagactctggagctctgccgactttgaatctcatctctactgcttcccagctatgtgaccttcagctgttgcccaactggtctgagtcttgggtttctcaactgcaaaatggagaggatttgtgtaaacagttagcacagtgcctggaatgttgagtgtggtggtgaggaagagggactttgcagccagactgcctggtttgaaccccggctccactgcctgggctggttacttagcctccctgtacctcagtttcttaatctgtataatggggatactaatggtacctatgtcctaggattgttgtggaaggcaacgaatccatatatgtaaaatgcttagaaaaacttacatatgtgttgttggtaatctttaggagatgtttaagaaacggtaacttaaaaaaaaaagttgctaaccacaaggaaaccaaattcaattccttagcccatttccatccccacagaatttataattcaagctggaaggcaatttagagatgagtgaatctggcctttccatccattgcatggtgagtcaactcgtgctctgagagggaagcaactagcctgaggtctcttgggaggtctttgcaatgctggaactttaacctagttccctgggctcctaaccagagctcttcccaccagaccctgctgggctcacgggaacatccctgcacatccaccgtggcacccgccctcatcccacgctgtctcgttctctccggcaggcaccgttcatcttgtcctttgattaggtccttaaggagaacctcccttctcccctttaaatagttcctgtccttatcactgagtctggagaatgaatgaaatataaaagaaatatggcagcggtcccaaaggaaatcaggcaactgatctttttaagaaaggaagatgggccgtcttctctgggaatggttctcagttacatgtctttgttgagggtgaacagttggaggaaaagaaacagacctaaagggattgtggggggaattaaggcaaaggagatgggggaaaggcagggggaagatggggcaggaatgggttttagggaatatacactgggggcgggacttgaagcaaatcttcagtgggtagttagatgtcccatcctgcatgcacacacatgcatgtgcacacacacacacacacacacacacacacacacacacacatagagcctccccaggtctcccaatctcaggtgaggagaagggggctctattagtcttagagacaggtgggcccatggccttctttgcagagaagatggttagaatcggtcatgtgtctctggtctgagaccctagagaaactccaaggagaataaaaaaggttgggggggggcctctccctcaactcaaaagagcaaccctatcaggcttcagaaaagcaagccctcctagcactccaacccacgggagcagctgtctgagaagtcccaactcctccagcagccaccccctctgttccttcacttctcttgggcccaggcagagacacagacaggagtctgtgtgcagaaaaagctccccaggcccttttctgtggagagctgctccagactaagcgaatctcagctgatctcgtgcgaaatcagaaacgccaggatgtgtattccccacgggctcctctctttgtgtctgtgcatgacccaattcagactcctctgccgctgtcagattctctcctgcccatattcactttgaggatggatataaccttatttttgtgtgttgttcactaaccccagggacttcgctagctgggctgtcctacgtggtacagtaaccaccacatagtgtggcctccaggttctcatctctgggtaaataaacatctccgcacaggcttggccagctctggactggctcagttcctgcatgatgcaataggtctccaggtcacatatccgtgcccactagcaagagggaaggtaaggagatggttcttgccctgaagtcctcttgttcctgtgtcagagtttatttaggacagaatagtttatatttgctccaagtaaataatatctgacattgggaagcacagcagatgcagcagatgagatgcccccaaaccatttcccaatgtttaaaaagaggcctggaaaggacaagctcattgatctcatttggtttatgaaactgcactcaagtgactgaagcagaaacctgaccacgtgtaaagactgaatggctcaatctgcttcccaggcccagagggtgttttctgtggcctggcccaggcctatggtgaagccggtgctagggggtcacctatgtgggagccagctctgcctcctgccccgaagctccagagacttctcctacaactgactctctggacacgccctcttgcttgcactagtatctcttacctgccacctgccctcctccacacaccccgatttcagggaagctcagctgctgagagtgctattgacaacctctggacttggaaatcaggaggaagggaatgggaagaatggtggcagctttgtgcctgggctgttcaggaagacatccctctgcctttgttctccagggcaagacacagggctagacacgccggaatccttaaatcctttgtcaaaagcagaactgggattttcgtccaaggactacacctgtcctgtcctcagcctccttctcagttgcccccctcccacccatgctcatcagagccgaaccctgaggaaaccatggaccgaaagaccttgtgagcttttgttgctgggagtgtcagaggctgggagacagaaggtatgagagatgagatgccatggaagggatggcagcgatcacagaggctggggggcagaggaaagagacgttgaagaggtggaggggtaatgaacctaggcgggagacaggctaacatttactaagtgcccgtgatgcaccaaggactaggctagctatacaacctttcattgaattcttatgacaacagagaaggaaacaggtttagagagctcatgtaacttacctgtggtgacacagctagcaactttattaagattttgttacgtactatacactgtattaagcatcagtatcttatctcatttaatccccacaacaactctactagagtctcatttaataaatgaggaaacttaggctcagagaggttaagtaactttatcaatgtcacacagctactaagtgatttcaaccagttctagctgcctccaaatttcttgctttagtcaccctacttcaccgttcaactaaacagctgtttaataccaaatatttctggagcccctactgagtgccaggcactgtgctgtgtccagccaacatctttcaaaccctgccagacacagagctctgacctgggagaagggagaatcaaataacaaagacacagcccccacctgccaggggctgtgacccccacagctgggcaataaccaggtctttgctgctccacagtaccttgtccctgcttctcccctctaggccctgcttcttacctaggcttcctccatgggctagccctgcagatgactgagagggctgagatggctttgccacagactagtcactgggcaatatgggcaggtcacctcccttttctgggcctccagctccccagctgtacaatgaggttgctggaccaaatcatttctacccatcgcctccagctctgacttgctatgggtgccttgtctgggcagagtctgggaggccagtgctcagcggggtagggctctgggcatgttgatgcttgcacgaggtgcagggcaagtgtgtgaggggctgaggaagctgctccacccccagctgtggtttctggtggggccaccatggcagcaggtggagggaagtgtttgtcacccttccaacaaaggcagtcaaacaaaagcctcccagggcaccatgggaataggcggcaagggcgccaaaaataaaacacacttctcctttgataggcatcggtggcaggcataggcagctgctaagggagtctgtccttggggtggtgaggaaagggttcagatttcgtgcccaagaacactcacactcacaagagctgtcccacctcacaaacagcccacacatacagatgctcaatattcacacaagaaacaccaccgcacacatcacacacacacacaccaacacagcagtcacacaatcagcatacacatatacacatacaaatagaaaacttgcccccatacaagaccagcttcatgggccgcgacctgcacagtcactctgggccctgcactaaggccctgcactaaggcccatgctgggtataatgctttgctgcctgcactttgaaattcttaattatttttaaacaaggggcgcagcatttacattttgcaatgggccctacaggttctgcagttgctcctgtgggtgtgcactcatgagagcgttcactacctgcttaagcataccttttaacacttttacactgttgatgggagtgcaaattagttcaaccattgtggaagacagtgtggtgattcctcaaggatctagaaccagaaataccatttaacccagcaatctcattactgggtatatacccaaaggattacaagtcattctactataaagacatatccacacgtatatttattgcagcactatttacaatagtaaagacttggaacgaacccaaatgcccatcaatgatagactggataaagaaaatgtggcacatatacaccatggaatactatgcagccacaaaaaggaatgagatcgtgtcctttacaaggacatggatgaagctggaaaccatcattctcagcaaaataacacaggaacagaaaaccaaacaccacatgttctcactcataagtgggagttgaacaatgagaacacatggacacagggaggggaacatcacacactggggcctgtcagcgggtagtagggggcaagggaagggagagcattaggacaaatacctaatgcacgagggacttaaaacttagatgataggttgataggtacagcaaaccaccatgacacatgtatacctatgttacaaacctgcacattccgcacatgtatcctggaccttaaagtaaaattaaaaaaaaaaaaatcctacctatatagacaagagtgcatccgctacacacatacacacagatgcacaaacacatgcatgccacaaatgcaacacccacacaaacagcaatagccccccatgttcacgcgccaaagcacacacattgatacccagaaggggtccagacgctcacaagcaacgctacaacatgcagcctatgccctgcagcctgctgacacaattcaattgacttaacattgggggcagcagaacaatgtgaagggaaggggcttggagagaaaacaggttcatgtcctccacctgcaaacatctcccacctctctcttcggccctgggctcacccaccccactcagcggctgggaccagaagaaagggagagccagggaggtgggcgcatggacggaaaggggacagggatggaggtggagagggagagagagagggcaagaaagaacgggtggggagtgggggcaggaactgagtccccaggtgagctggccccagcagtggtctcataagagctcagaaggtcttggacccaaagcagtaagaacaatgcccctgtgctccccgcaagcacagggcggtcccgccctcagagtcagtcagaggatgcccacctcccttcttactagctacacagccttgggcacgccgtgtaactccgggcctcagcttcctcctttgtggaatgggatagccaattctacattgcagggtggcaaggcacacacagacacaacacctcctggattcctgcagcaatcaacagctcgtctcgtgatcaggcctgcaatctgattcttggcacaggaactccagaccccctcattacagcagacatttggaacgcgtttatttcccatcttctcctggtctcacttcacacctcacagccaggtacaagcacagaggtggatgtaattcatggcctcatggccaccatcacttcagggaccttcaggatcctgcagccccatcctgccccaccccctacccaaaccaagcaggactccaaggcctggaaatttttcttcctcctctattcttttttttttttttttttttttttttgagacggagtttcactcttgttgcccaggctgggcaatggcgcgatctcggctcaccacaacctccgcctccagggttcatgccattatcctggctcagcctcctgagtagctgggactacaggcacccaccaccatgcccggctaattttttgtattttaagtagagacagggtttcaccgcgttagccaggatggtctcgatctcctgacctcatgatctgcccgcctcggcctcccaaagtgctgggattacaggtgtgagccaccgcgcctggcctcctcctctattctttacccccaacctgtattctccacccccaaccctaaccttcctgatttatttatttatttatttatttatttatttatttatttagagacagagtcttgctctgtcgctaaggctggagtgcactggctcactgcaacctctgcctcccaggttcaagtgactctcctgcctcagcctcccgagtagctgggattacaggcatgcgccatcacgcccagctaatctttgcttttttttttttcttttttttgacagagtctcgctcagtcgcccaggctggagtgcagtggcacgatctcggctcactgcaagctccgccacccgggttcacgccattctcctgcctcaggcgcccgagtagctgggactacaggcgcccgccaatatgcccagctaattttttgtatttttagtagagacggggtttcactgtgttagccaggctggtctcgaactcctgacctctagtgatccgctcacctcggcctcccaaagtgctgggattacaggcatccctatttaaaattgtcccagcctctgtcccttccctgaaaaccccatcattctgttaggtgataccagattcttaaagagtgattcgggaaaaacgaatgggccctaaggggcatgccagtgtgccccattccaattacagtcacccacaggagagaggaaaggtcgtccaagtggccaccaacaagaaactatttcatcagatttcttttttgtttgtctgtttgagacggagtctcaccccgtcacccaggctggagtgcagtggcgcgatctcggctcactgcaacctctgcctcccggattcaagtgattctcttgcctcagcctcccaagtagctgggactacaggcacgcaccaccacatccagctaatttttgtatttttagtagatacagggtttcaccatgttgcccaggctgctgtcaaactcctgacctcatgatccgcccacctcagcctcccaaggtgctgagattacaggcgtgagccactgcgcccggcctatttcttcagatttcttataggacataagtcactcagatcccctcacaggctttctgtcaacttactgagagggaaactgagtcaaggaagagtgaagtgacttgggtgagcagcagagttgagggttgtggtctttctgatgtgcagtctccatgagaccagatccagaacaatccatgccccaccgcactagcacac

SEQ ID NO: 5 - DNA, 2173 bp, Homo sapiens
cccagacaggggtagtgcgaggccgggcacagccttcctgtgtggttttaccgcccagagagcgtcatggacctggggaaaccaatgaaaagcgtgctggtggtggctctccttgtcattttccaggtatgcctgtgtcaagatgaggtcacggacgattacatcggagacaacaccacagtggactacactttgttcgagtctttgtgctccaagaaggacgtgcggaactttaaagcctggttcctccctatcatgtactccatcatttgtttcgtgggcctactgggcaatgggctggtcgtgttgacctatatctatttcaagaggctcaagaccatgaccgatacctacctgctcaacctggcggtggcagacatcctcttcctcctgacccttcccttctgggcctacagcgcggccaagtcctgggtcttcggtgtccacttttgcaagctcatctttgccatctacaagatgagcttcttcagtggcatgctcctacttctttgcatcagcattgaccgctacgtggccatcgtccaggctgtctcagctcaccgccaccgtgcccgcgtccttctcatcagcaagctgtcctgtgtgggcatctggatactagccacagtgctctccatcccagagctcctgtacagtgacctccagaggagcagcagtgagcaagcgatgcgatgctctctcatcacagagcatgtggaggcctttatcaccatccaggtggcccagatggtgatcggctttctggtccccctgctggccatgagcttctgttaccttgtcatcatccgcaccctgctccaggcacgcaactttgagcgcaacaaggccatcaaggtgatcatcgctgtggtcgtggtcttcatagtcttccagctgccctacaatggggtggtcctggcccagacggtggccaacttcaacatcaccagtagcacctgtgagctcagtaagcaactcaacatcgcctacgacgtcacctacagcctggcctgcgtccgctgctgcgtcaaccctttcttgtacgccttcatcggcgtcaagttccgcaacgatctcttcaagctcttcaaggacctgggctgcctcagccaggagcagctccggcagtggtcttcctgtcggcacatccggcgctcctccatgagtgtggaggccgagaccaccaccaccttctccccataggcgactcttctgcctggactagagggacctctcccagggtccctggggtggggatagggagcagatgcaatgactcaggacatccccccgccaaaagctgctcagggaaaagcagctctcccctcagagtgcaagcccctgctccagaagatagcttcaccccaatcccagctacctcaaccaatgccaaaaaaagacagggctgataagctaacaccagacagacaacactgggaaacagaggctattgtcccctaaaccaaaaactgaaagtgaaagtccagaaactgttcccacctgctggagtgaaggggccaaggagggtgagtgcaaggggcgtgggagtggcctgaagagtcctctgaatgaaccttctggcctcccacagactcaaatgctcagaccagctcttccgaaaaccaggccttatctccaagaccagagatagtggggagacttcttggcttggtgaggaaaagcggacatcagctggtcaaacaaactctctgaacccctccctccatcgttttcttcactgtcctccaagccagcgggaatggcagctgccacgccgccctaaaagcacactcatcccctcacttgccgcgtcgccctcccaggctctcaacaggggagagtgtggtgtttcctgcaggccaggccagctgcctccgcgtgatcaaagccacactctgggctccagagtggggatgacatgcactcagctcttggctccactgggatgggaggagaggacaagggaaatgtcaggggcggggagggtgacagtggccgcccaaggcccacgagcttgttctttgttctttgtcacagggactgaaaacctctcctcatgttctgctttcgattcgttaagagagcaacattttacccacacacagataaagttttcccttgaggaaacaacagctttaaaagaaaaagaaaaaaaaagtctttggtaaatggc

SEQ ID NO: 6 - protein, 374 aa, Homo sapiens
MDLGKPMKSVLVVLVIFQVCLCQDEVTDDYIGDNTTVDYTLFESLCSKKDVRNFKAWFLPIMYSIICFVGLLGNGLVVLTYIYFKRLKTMTDTYLLNLAVADILFLLTLPFWAYSAAKSWVFGVHFCKLIFAIYKMSFFSGMLLLLCISIDRYVAIVQAVSAHRHRARVLLISKLSCVGIWILATVLSIPELKDLQRSSSEQAMRCSLITEHVEAFITIQVAQMVIGFLVPLLAMSFCYLVIIRTLLQARNFERNKAIKVIIAVVVVFIVFQLPYNGVVLAQTVANFNITSSTCELSKQLNIAYDVTYSLACVRCCVNPFLYAFIGVKFRNDLFKLFKDLGCLSQEQLRQWSSCRHIRRSSMSVEAETTTTFSP

SEQ ID NO: 7 - DNA, 63732 bp, Mus musculus
  misc_feature (1)...(63732): n = A,T,C or G
gagtgtgtggctctactacagcctttgcctcagagatgaggctatgggtttaatttccagaacatgatgaggaagggaggaagggagggagggaaggagggannnnnnnnnnnnnnnnnnnnnnnnnnnnnnnnnnnnntagggtagcaggaagggagtgtgtaggtcactgatgccaatctcattcttcatgatgctctcttcatatcactgagatggcgagcttgaatcaccctctttgaaccatagcccttccctgaagtgatcctgggagacagtgaagtatgacaaggtcccagctctagaccaccataggccttctgggaattgtacccagaaagacctaggacctgaggtctgggtggatggtaaggatgagagtaccgcgagcacgcacaatgtctgattttgttcagtacttctctctgagacacttttcctgactctttccccgactcagcaatgcctgggaatagccagagcaactaggcagggggaggtgactgtgcacacagggatgccagctcatggcagcctccagtcagctgtgcccctaacagctacagagacagcggtggcagcggttcagctggagaactgagaaaacagctgttttctcccaacaccagctctgagtctcagggggattggggatgagcccagaatgagatttggtctcagcagtcttgacccaggggacttcggctctcacagaaacctgaaagggctctcagcccagcttccacatgttgcttcaggcctgctgatggcccctctcagacccatgagccacagcacctgtcccagctcgctcaggtaacatatctcccatgaacaggccagggtctggatccttgagtccttattttctccacaattctcgtctgtgtatcttcctggctgtggggtggatcccatctggccacagacctgagcaccagtagctacagttacagtcttcaagtagcttgttttctccatgaactagcattcctgctccaggacacagctcctgagccatcccttctgagttctcctggagttcagaccccaccccacccaccccctccaagccccaatgtttcacccagaaccaacagaaatgtctttccatggagaaaccatgacacacccctgggcttgatatcctgtcaacactgctgacttcctggggcccttgctggtatgtgtgtcacctcagaagtggctggggcatttaaatagcttggaccatcaccttcagaatctctctctctctctctctctctctctccaggtcagccccgttcatctgtaacctccacgagggggagggctaggggcacaagaggctcttgggcagtggcggggggggggcagagggtcccctaactgcagaggctagctttacacacccagcaacacatgtccccctttatggcccgggttttctctcggtgcttaaaggctactgagaaaagagcagggctgattctggctgcctggccgtctcctggcaacaggcctggcaggaggtctttctttctccccccccccaacctcccttcttttctccacccacccccccttttccctttcccccctgtgtcttgtgttgtgtatcattaaaacttccctcccagccacttggctgccagcaaccaggcccttctggggccagttccctccgggcagatagatcagctggccccaggggtgcaggatccgaggggtcaagcccccagagtggcagctttgtgtgatggaatgaggcttaaactccagttggcaaccttcagtacattcatgggggcagccaccactgtgtgcacacaaacaagcaccactgtgcgcacacaagcaagcacctctgtgtgcacacgagcaagcaccactgtgtgcacacaagccagcaccactgtgtgcacacaagcaagcaccactgtatgcacactagcatcactgtgtgcacacaagccagcaccactgtatgcacacaagccagcaccactgtgtgcacacgagcaccactgtatgcacacaagccagcaccactgtgtgcaaccaagcaagcaccactgtgtacaaacaagcaccactgtgtgcacccaagcaagcaccactgtgtgcacacaagcaagcaccactgtgtgcacacaagcatcactgtgtgcacacaagcaagcaccactgtgtacaaacaagcaccactgtgtgcacacaagcatcactgtgtgcacacaagcaagcaccactgtgtacaaacaagcaccgctctgtgcacacaagcaagcaccactgtgtacaaacaagcaccgctctgtgcacacaagcaagcaccactgtgtgcacacaagcaagcaccactgtgtgcacacaggcacatgtgcatgctgcaccccagctttctcttacccacctccttctgggaccctgaaatctctgtgactgcttggaacatgctaagaggtccatggacaccacccagtcctgtgagtagtaagtacctcctgggctagatatgaccctcacctatagcaagtgtccgcagaaggctgaggtagccacttctagggacccacagctgagttcctgttcagtgccctggtctgtcctgcaaggtaaggacatcaaggataatgaccattagtaatggtggagaaacgaagcatctagtctagttagctgtcacggccaaaaggactcttaattaggccacgttaatctataggaagggtcatagtcaaagagggtaagtgagcatgcagcccaacgacagaaaatcggccagggaccccttggctccccacccacatcctcccagctctcacattctgatggaggacaacaggtagagactaacagcttttctgggccctggactgtctaccttgtctgaagtctacagtgtctgaagtaggtatctgaacttgacccagccctcttcctcgccttcctcctcccactcctgaagaaagcttctcacagaccaaagaagtgaggctcctctggacagctgagaggccgtcacgcttcctccttactgggaatatctgggtcgcagaggcctccgtatgacccatactttcaccctacttactcgtaaggctggattggtgtccccaaatatgtccaatactttgagacggggtgggggtggggcctcatggccatggagattccagatgcagaggagggaactcagtgccacctttggctgtaaggaacagcctcaattgggattaggaaaatacaccatcttgaatcataaacaaacaaacaaacaaacaaacaaacaaataaataaataatcttgaatcacaaacaaacaaacattccaagacgggattctcagggcagttaatgtctcagcagtggctcaagagactcagtttctcccaccctggtcttaagtctctactttggtctcagtcagttgttctcacagcatccaaccaagatataacaataccccaaagcggggaaactggacagcaatttagcggactgctcactcccctaaatactttctagaaatcacaggtccgtcagctgactccccttcgtgtctcctttgagtcggtgtagcccaagcccttgcaaattgactcagactagtcagcatttatctctgagccaggtgggggagaacaaacttggttcctcatgtgcctaaataaagcctctgcctttacatatacttttatatacatatatgtgtatatatatcatcctagtcaggatttctactgctgcacaaaacatcatgaccaagaaacaaatgggggaggaaagggtttatttatcttatacttccacattgctgttcatccccaaaggaagtcaggactggaactcacacagggcaggaagcaggaggcaggagctgatgcagaggccatggagggtgctgcttactggattgcatctcctagcttgctcagcttgctttcttatagaacctgggactgccagcccagggatggcaccccccacagtgggccctcccagccttgatcactaattaagaaaatgccttatagctggatctgatggaggcatttcctcaagggaggctcctttctctgtgagaactccagcttgtgtcaggtggacacaaaaccagccagtacagttacttgcaaccataagtaactccagttccagggatcctgacctctgcaggcatcgagcaggtggatggcatacatgcatacaggcaaaacactcgtacgtgtaaaagaagataaatccaaaatagtaataataataaaaagtaactcaaaagaactttcctcctcactcagctcagctactgccaggaaccatttcagagccagcaggcatcaccactgcaggcgagggaataggcttagagagcataggaaacatgaaacatgcccagggttgtacagtatgaggcagagctgggctctaaggcaaccactcagacagtgtctccctggacaaacaaccgaaatctcataggacagatcctgagaggccagcaatgctaagcagggtttgcccaaggaccgccccccaccacctgtgacagctataaacacctgttccaggatctttgctggtgaagtagcgagggccccagcgactgtccactgaaccatctacttgtgttcagactcttagcccctagagctcatttctggtccaacctcagtttccccacggtggctgctgttggtcatacttgtctgtgaagggatggttgggggcagagatctggagggtgcaaaccaagcatgatgggcaattgtctgccctatatccatggatcagaccaggctactcgatccccccccccttttttttaaatagtgtccccaccagactcttctcccaagagtctggctggctcttaattttgctgtttagaaacatttgattttctgaggtatgcctcttccaggagaaggtaagcctcatagactcagaaccctggggctcaggcatgcttacctgggggttacctgcatatagtccttcttagtgaacaactaactacacaggacacctatgcaaagaacacctgggacctctgtaatggcatgcacatgtgtgcacaccacacacacacacacacacacacacacacagagagagagagagagagagagagagagagagagagagagagagagcgatcattgtggctggaggggctgtcaagtctcagatgcctccaggtgtcagtgacttctggccaggttgctatgttctcatctcaagccatcaggaaaggtgggtgttaccttgaggaaaactgaacccaacactggggtggacaggtctccaggaagcattaaagtgccttaaaataccacacggaacataaacccagggccctctcatctgggatctcaacaccctctctaagtctgtcagcctactctgttcttggtgccagagttctcctgagttcagttggataaagggcagcacacagcacacaggcttaggtgtgccatgtgttaactccatggcagtgttaggggcttctggccagagcctagggtaggggttggccactgatggaggtggagagactctccaaagagatgctgatgtgggagtcctacaaggggcgggggcggggtgggtgggttggcctctgatactaggacatgttagggggagaggagtgcccttgtcacagaaaaaagaagaaagccagtgtttttttgtttgtttgtttgtttgttttttaaccatccaagtcagctttgtgtagtattaatgtctaatgataaggactccctgtgagatagctaagtcccattctcacaccacaattgagggtacattcagggagcagctacctccactggccttcatttcttcttccaaaggaccccttccaaattaccctggggacctgccgctgctgttggaggatcactggaaaaaggggacacctgacatcttcaggtctggcagacctagacctagaaaggatacctgttctgggtggaaggccttggggtatcacaggtccactcccagagatgccaatctgtatcccataagccagtctgctgactgtctctagggcctgcaagtcctcccaggtgactcaggggtgccttgagcctctaagtggagcacacttgatccccaggtaagctccgaaattgcacagtagattaagggaattcactcacaaggatgcctccttagctgagatccccaaagatccaggctgcataggacctgaaggctcactcacttctgctttccagtcagcagcaatgtagcaatgtaggagccaggcagcacagggaaggctctgagctctgggacagacacctgcatctctttgggtgcttggatccccctactctttggcctttctgcaggccacaggcttcgacttctgagtcttcacttaggatgatgaggcctacctgcatgaatagcgtcgtgtctaatttttgtctccgccaacccctccatgatcctcctacttccaaggccaccttctgctgtctggtctcctagctgtctccaggaaactcacccgaaatcgttcgagaggctcctagagttgttaagggagacccttaaaagctcccttctcctggtcagagaccttggagtctcccgttccttctggtgttcttctgagaatctctgcttcaggtcccttgaccttcgcacctgatgcctccctgctttgcccacagtggtttttctccctccattcctacattaggctaggttggttctgagcccccacccccatcccgcagttcccagagggaacagtcccagcaaaaatacatggaactcagtgcctgagtgggagatttccccctccctcctcacgacagactggcagccgagtgagggcgggtgggggtctagcggccaaattctttgtcttcgaggtgcctcagcaggggtccggtggagcagcgcagaatacacacagccgctgaccgataactcctggagagagcgcacttcaaaaggaacctcccggcagctactgaggtgggggtgggggtccccatctcgggtctgaagtccctgtcagtcacacacagcacgcaggcttccacgtgccacatcttttgctgcaggtcctgggtcccagatgccttcccctccctcaaccaggagaccacccttcctgtccagggcgagcctcatatccaccctcattagctggtttcagagtaaaaataatcctttcccgccatgtgcagcctaccctgatgttgggtgcctatcaagagagaagatgtgtctaggagatactcgtggcaaaggggctccctcactgcctgggcagggtccattcctgcgttgccacccgcaggcaggaggaagaaaattaagcctgtgttgaaggaaggacacctggcaagagagacgaaaggactccggaatcccctcctctggggaactttcaagtgggggggaaatccccacgcaggcttctactctgcggcagcaacatgcgcggccactccccgcttctggtcccctcctcctttccttcttgcacctttgcctgtttgtttcctaccctcagaacagcacctggggctgcctcgggctctggtttgcctgtaagaggcacctgcatacacacagcccttcaagggacgaccagttttagccacaccaggacagcttcccacgtatctcgcaggcagccaacatctcacccaaagccaccaagagcctttgcccccgctctcttgggctggcacctgtggaatcttaaggatctaaatgaccccaagaagccctccagattagctcttgcctccacaccatagcggtgtgttggaggccagagaaagcaacgtccctgttttcagaaacactaattttggactgcccccccccccgccccacgctctgatgcaggactagagatttaatccgcatagatgttcagcggcctatggggagcccccatgggatgagcagcaatcaagatctcagctaaaggctacctagtaacccaaaagcctgtgaagcaagctccttgacagaagcctcagccccggggctttgcattccccgatagtggccaaccccctcctactgccctcccaggtgaatcagaaacggggcctcagaatcagccgtgccccttggggaggaatcttctgggaatgcccggcccccgggggcatttctaggggtgcttatctcagtaccatctaccagctccactagtcttcagcaggtgggggattgcctgctgttccttagccctccccacttctccccttcccctttcaacccccacctcttcctctgtctgggcgttcaccccacccccgcccctgttttccgtctcagtgtctctatccacttgtctctctctatctccccttcctcccctctttcatctctccctctacccccctccagccgaggatcgggctaggaactcgcagaagctgtgacaagcccaggcggctctctcgacccttggtgcccccaggggccagttccttgctctccttacaccagcagaagccatgtgccgagaacagaccagcaggggcagtggatccgagctgtgggcaccagcctgccggatcaaaggctaggaatgtctgctccccgtaggacttccctcagtcccatccacccctaacagcaagaaagcccgccattcctggctaggcaggtttgggtgggctccctctcttcaccgtctacacagttaagtcccaccatggcttctcctttggcttgctttctaggtcccaagccaggagcatttcaagggctgaatgtcttctgtgtccgggtagagaggctgaggtacctaggtaaggggactgaatcctaacaatctaggtatgattgggctcagacttaactcccaaactgtggagaactggtaagaagagtgccccttggaggcctgaacagttccccttgtataagagcttcagtaggtcgtagggtgaatctggtgtctgcacgggacaacgcttaaacaccaatcgccaggttttagtttctcatccgtagaagggtcgggaatataggtcagagacctggacataggggaggtagatgttcctgaagagccctcgcccccaaccactaatagacagagctataccgtgtttcactagtcccaaatgcttccatcctaagatccaagaaactgcaggtactgctgaggtccggccagcacgcctgcaggaggagaaagtgaccgaatcctcccgcaggaaatgcaaacggcggctggtgtcagttgcaggaaatgcaaaggctgcaggaggtcgcgataccaatctgactcttgacaaaagactcaaatgacactagctctgtcccccggcgccgccggctggcagaccttcagagcctcagcggactctcccgcgcgcccctcggacaccctggaagcgacctgcggccgggtggcaggggccgccagctcgcgagcccgaaaaggctggagactgggaggggttgcattttcctagcccctgatcccagtcgcgcgatctggaaacaacccctttgctttctagtctcgattccttacgggcccaagtgccaagggatcacagaaaagggagccacccatcaatgcccaagccgaccccttcaccacgtgaacgccgggtcaaagctccagctccctaaacctggctcgcgtggactgggaagggggtgtcccaggccagcagagaatccagcgtgccgggtcctcccgaggcctccgtgcgcccggggcgcaggctttgcccaagtttgccgggagatgcccttcccagagccggagttgtgggccgggcgggaggggcccgtgattgacaggctgaactacagactcatctcttaccttaggccgcgggcgctgattggctgctcgctgacatcctcaaacccggctgctcggcgctgggctccggaggggggcggctgcgggtggaggtgcgcctctgacaagcccgaaagtcatttccaacctcaagtggactttgttccaactattgggggcgtcgctccccctcttcatgatcgccggcaaacttcctcctcggcgctgcttctaatggagccccacctgctcgggctgctactcggcctcctgctcagtggcaccagggtcctcgctggctacccaatttggtggtaagacttgcctcttgtctgcctgcggccccgatctctcggccgcacccggggacggtgggaggcgctggccgggtctgggctgcagcaggcctggggctcttttctccttgcttcccgctagccccccagccgtccacccctcttggatcttctgctggtgtcgccttccgaatccaactcctggcttctcagataatcaccattttccctgctacccgccgcagaggcgggagggctctccctacccctgaaggtctctcgttcttagtcttcaccctctcccaccccaatttgggggtcccgaagaaccttcgtttgctcacacttgcatttctgtgctgtccccgcggcccggccactcctcttctccattttagggtctccgtgggtaaaattatcctgtcctttttcgccaccgcacctcttcggtgtctcggtcaagagatttcccccacaatactcgcgtttgccttcatatttgagaccttaagggctttgggaatcccaagcaggggacttagggggtatttcagtagattctccccactccgttctagattaattttgagcctctgaagtgactatagaatttgctgatcctagatgccattgctgatccgggtgtattcgttccttgcttgtccatcccggagaaaagcgaggtgggggctctttgaaaatgtacttgtttgggaggggtaggcttgctgggtttttttgagcgaaaacctagttctccatgtcaaattcgttgcttttggaagacggggaagctaggagaaagggcgagggaagggggaatgctgtccctgagaaatacggatacaaaaggcattttagtaaataaggctgggcgagcaggcggagtacttggagctgatgggtgtgtgaagggattcactggaagataaaccgccttttggaagccccagctccagagactcccctgttttccaagcctcattgctgctcctcctctgtaggtcctccggtggaagacactaaaaccagttttctaaattacaccccagccctctcagtctccagccccctgcattccggaaaactttaataaaagaaccctcccctcctgggcagtggctagagccctggggggggtgggaggtgaggaggaggaggaatttgggacctctgagtaagaaggagactggcccctggggtgaaagttagaagtgctaccagggtaaagtgctgcctacatggccccctccctgcctgctacctgcaagcctgcagtatgaggctcagagcttataaaatactgggccacaccccaagcctttttccagatgctttggggtgtctgaaggccaggggagggggcagtcatgaacccaggcacccaagccatggcctgcccaaggttctgtttagagggtccaggagttgctccttaggttgataaatacgccaaggacagaccatctttctttcctgtggacttgggctggtctggggctcctgtgtggagtctatagagcctgtgcatgctggggacagccagggattccacagtgaggttctgccaattggtgaaaggttgcctctgcctccggactttccttcccccagccaaggccaaactctgccttctcagagaccctgcggtggcgggtgcataggaagagagggtgcctggagccctagggatggcatagaggaaaaaggagagagtgggcttgctagttctgtgaactggaagagagcacttcctggggcagtaccagtaggttagatggtggtaacagtagcctctgtgtgtagtaatgtccaggaatatctaggtaaggtccccatccgacaagaaatattaggaaaacctggagggcagagacaggtcctaacataacatacatggcctgtttgggggttaaggggggaccagatggctgcttttgtctgagccatagagagtatgtatgggtatttttgagatgggtggtttgtcagtgcctgtggctacgacctctgtgtgtgtaatacagtgtgtgctctaggtcagtgaccctaagtgtctgtgtacctgtatgtctctgtgggtagaagctgttagtgcctgagacccaggcaagtgttttgtgtgaaaccttttggtgtgtgcctaggggatctgcggcccacagcagggtatgctgtatctgcatacaagtatcagcaagtggctggttctgtgatgtgacacagaagtcgagaagtatccgttgcttgtgtaaagggggacctcctggcttttgcctgtgatactggacatggcagtatttgtgtttggacttgtgtgctgtctgtgcatgtgtctgtgtgtgtcccttcacccgcgcatgccttcctgacagcgtaagggggaggcccaacaaatgtctttgtgcgtgagatcggtgttcgtggcatgaccagccatggttggaagtatgagagtgagcctgggaggcctggctgagggctgtgtccgggcccagcttctgatcgtgaccccaaatgccagtgacatagttttgtgccagtggttatgcgtctgtggtcatgtttgctgacacctgacttgtgggtgtgaagaatacctgaaaggggtgcttggtggccatcagtggccctgaggggaaagacaggcaggaagtggaggtctcagaaggtggctgcagacacaatcggtctgggatcccagctggggtgggggcagggccttccttgacaccatcaagccttgcttgcttgaggactgtggctacgagccttccctcctctaaggtcatttccctttcgtcttggagctggggcatgaatcaccttcatggggctggaagtagagagtgggtaggcctcaaattcttgattcccctcctctgccccaaggccggcagattccaggcctttgagtccgtgactgcctgccacctctttggcccacccggctctcacgttcacccagaggatttacaggggaaatggcttagctgggatttctgtccacatcaccttcagaaaggacccctactcccagtagcccatccctgcttttccttgcaagggccccaactctgagacaaggtgatgaggaaggggctctgaggggcctcttactctaaaaggaagccctgtgctccagagcctcccagcctggcagtggctccattggagcaggaccagtgacaaccagcctgctttctagaactctccttcatagtactagttagctcctagtaaagaaatctgtctttctctttcttgaggaataagatcgttctacggccttgccctgtgccatctgtgctccattggaagtgccctgaaaaaggaggcctggttggctgggtggtgtttggcagctcacttcacactgtgtggctgaggactggtgattcctccccacccccccttttgggggtcacttttctcactttttacccaaccttgcagtttagaggggaaatgttttgctgagggctccaagcctgttagggcgcctgggttctcattgcaccactccagagcccatcctccacccaagcacctatcttaagccctgcctcagtttctctatgtgtcacatcctgctgcctcccctgctcaacgcccacccaacagccttctctccgaggcttgggaactaaggaacgtgttcagtcaaacccccgtgggggtcagtgggctgggcccagggaggcacctggagactgtgggggaggaaggccccaggccaggtgttaacacttgtaacaggcaggaattacagctggctggggctagggctggtgagccgagctggctggaggctgttgatcccacagacagtcagtcagtcagtcagacagacagacagacagacagacagatgggagataccagatcggatggccaagctttagcagggtggtcgctcttccagagaagatcttgccgtgggggaattcgtctggggggaaaaaagaatgatgggccccttgaaaatgagttcacagcccacccctattgtgggcggggccttgtgctacaaagggatcgcaatttggtggttggtggtagaaggttggtatccttctaatggcatcacacattgccacacaaacaacaaacaagacaactggtgaaacaccagctagtatcaggaactgtgtgtgtcctttagaaaagcggactggactttatagggaagaaggcacgtggttggggttgggatagtggttgaggggggacacagctgtcagaggaaagtcctcccctgccccctccccccttacaatctccaagtgtcttattaacagctttgggaccaagaggtaaaagctgggtgtggcccacttcttaacatagattctgaggtcttggagttttggatgtctaaactgcattgaatcctggtgtcagaagaggtgacctgggagcctaggccttcacaaagctggtacctgctgctgctaccccactgtaaactcagctagagctctctagggcccacgctcactcacttctgggcctctgctccaacctccattaaagagtcaaaacgagggccccaggtaagagtccccaagggacagactggtccaaggaagatttccccaccctctcagggcagaactcactgctcacaggaggacacagttgcctggaaggttagagcagtattcatgggcctcctaccaaaaccgcgaagagaaggccataccctacatttacccagcatccccctgttttgttttgttttgttttgttttgttttgttttgttttgttttgttttgttgagataggatttcttcatgtagccttggctgtcctagaacttattctgtagacctgactggccttgaactcagagatccttcttcctgcttctgcctcctgggtgccgggatcaaaggcacctggccagcacccttcttgaaggctcggccaccacatgttctgtttctatatattccctctggggagaaatgtttcagcctggaagtggagagccacgtctgagttctgagcttaccatccattggctgtgtgacctagggtgactctgtccttcttcagctccctgcctctctcttgactatactgagaggtgtccattcatcttcttagagcctcggggatatgatggggactccacagcagatacttgggacctgcctgaatcagcacaccccttgatttctgtggcttggtgtacctgccctaagccccactttccacccaacactgccatgccttcttaattcacttccaaacctcacgtaagggctctctattcctctgtctctgggctgctggcaaagtgacctctccccgtctcagtttccccataggaaaaataaagttatggccgctaccccatgaacatcagtgatcaaattcaggccccagaatgctgccggaatgcaggaagtacagttcaatgtttgaacctcggtctggccctgaatccagacttgtctcttcaaataaaccctccgagattggcccccatggctctcatttcttcttgttccatgtgcttggcactggtgcccacaggcttgtaacttccttcaaaatcagaagttcggctttttaaaatattttttattatattcatgttagtggtttcctacatgtatgcctatgcaagagagtcggatcccctggaattaaaattatagacagttgtgagctgccatgtgggtgctgggaattgaaccctgaacctctgaaaggaccagtgctcttcaccactgagccatctctccagcccattgaagttcagctttttttttttttttttttttttttgctgcctaggggaggtagggtaaggtggacagaggtggtctggggtctcccctaatcctcctgataccccacagtcttctgagctcggaaacctctgtcctctccagctggaacacagagctcccgggcctggtggggaggggtaggcttggggccctggctgctggagcagccccagcacgaggtgaagttgcttctggagctgggggatgactcagagggtgatttatagacggaaagcagaaagcttggctcctggcagaagcctgctgcttaattacattctttggggggtggaggtatgtggggcgacagcaagggagagacttctacctcgtcccctccgggcctggtacctgtgatgtcctagcaccaaatagggttcttcttagagagtgcgtcccctgtactgaatgcacggttagccactgagaagaggaagaagtgggacagaatcatcggaaggacagagtcccgtggggaccaccccagggacaggctgatggggcacacaggaagagtgggatgctgagaaggatcgctgaacctccaccctgcttctgccgaagaatccctaagccacctgggcctctgggtagccactctccacttccccttcgcgtggttgcctgtgaagaccttcaagttggcttcttgtcctgtggcttgggtcctggtagcccatgcgtgcaggagaccaggcctggaactcagagactaaactctgcgtctttgggttagatgacctgttgcgtggaagtgtgatgactgctgcaaaactgcagcggttctggtagcatcagcctcgtgctggagggaaggaaccccactaaccctgcctttaaactaactacagctagcctggctgcccatgctgaccagtgtagtgactccaacacagccccagatactgaatttctgggtcaggggtcccaaaaggtataggacaggcaggggtaaggaggccaaggtctgcagcacctggctgcctgtttgagcttggttagtacagctggcaggacttggcaggggtcaggatggggacagcagacagctctccagttccccctgaggcaggccttctcaaaatggcctcattaatgcatgtggagtgaattccagaaatgtcaggtatactcacacatctaaagaaggatggggacccagaaatgttctgtgcttggagacaagaggagtcagagtgagggatggtttccaggtccgggatctgaactgttggacatggtcttcctattgcaaagtgatgctctgtgctcaggacagtggatgtttgagttttctgtgcctagtgggagactggaactgattccgggacagagtagagaccataaactttatatgtgagcagctttgaggtgcaagctgaattgccaaccttcccagacctcagttttctcatccaccaaatggccaataacatgccttccctgcccatggtactaatgagagctcaggatgtctgtcttaccagagtcagctcagcaactaccattgttagaaagaagaccaagatccccaccccctacccagaggaggtgcaagagtatctgtagtggatccccaatctctgagtagaatctctgggagcagagccgttgcttgggtttaagacccagtgatggcaggtgtgctccagtttcagctctggaggtccacgaagagcacataggcctgatccccactgagacccggttaggaggtctgggtggaggtgagggcaaggtaggcagctggaagcactctctcaaagcccgaggccatcaggaaatccaaacacccccagggaatgccaaggaaacccacagcggcatagccctgttccctaactgagctagagagacttgaagagaatgtcctgtgtccctgtgttggcaagggggatgggagcaacaggaccctgtgaccaggtttgttgggagggcctttctgccaaacctgcccctgggcgcagagtcccacttatctatcggagccagccgggatcagcaaggaaaaccaatcttccagagcccgctatgcatgcaaatgggggcttgtgaccatgtgaacctgcacaccgcctctctctagttcctccacacttcataacgtggctttccgagggtgtcattctgtccctctgaaacctctcatggttctgatctagaccccctttgttttattttggcctctacctgcctatacaacatgcctttcagaacccctctcccactccttcctcaaaccgaacacaaaatagtacatgaacctctgcatgcctccttcctctgacctggggaaggcagtaggacttgacccctaggttgaccagggcttatttctgctctgccaagcacaggacctggctggcttgtggcatggagctgacaaccctaaactgtgaagggcctttggtgtctctaaggcaatgggaccctcctgagcagactgccgcagccgtgctggatactgggatgtctccaccatgtccattcccttgggctttgttgctcctcctcagcccagattgaagaatcctatgtatgtgttagagcttcttctacgctcacccagctcgtgctatgcatataaaggtgtcaggacccaggggcaggtgcccttacatgctgtgtggctgtctttagagacctagaagatattcttccaagactaacggtgagcagctgctttgcacagaccacacgtggtgggagaagggttggagcccacattctgcctccactcgggctcaggagaagacttcctagttagaaggaggagaagctgcttgtccctataagatgttgttctccaaaggatcactttgagacgagatctcactacactttcaccctgagagctgttccttcgagagtgtggatcccactctgatgagtctaggaactccaactgggatctggcatctgtcactggagctttcctgcaactggtcaggttgccctcgagttaggatggtgaagtgtggccatgcaaggtttttgctgcccttgggccaagtagggctagccttggtcgatcattgggcctctatgctcttaattggtagatagacaatgacctataaggtcactgcccactacccgtgccctcatcctccggtgttcccttttctccttggcatctgatcttcactgtgtgtgtgttcgtgtgtgtgtgtgtgtgtgtgtgtgtgtgtgtgtgtgttggggagaagctatgtatgcatttgtgggaagggggtagcttattcatgtgtgcatttgagcatggagccagaatacaacctatggtttcatatcttgggcactctgtttagctttggaaacatagtctctcactgagacattaggttccctgattcgtctaggttggttggctagtgagcctcaaggatttccctgcttctgcctccctagctttgggattacaggcacaccaccacacccaaccttttcccatgggttctgaggaatgagctcagcaattagataagccatcttccctccctagcctcagaattcatgcccatagcctagccctgagttggtgtttctgggctgttgagtctttccttgactttcacagctagacattcagcactatttcctgctgagaagccagaatgctctctcctttcttataaagcatatttcctttatgcatcagccatttaggaaccccagagctagacttgatactcgatgtttgcacctgtgctgaccttgggtgacacattcatcttctccttttcctgatccagtgttttcatctccattctgccatttatccagaaacattttgtattctaaactccttgcgggcagaccccatgcctggagcatctagagttcaccacgcttggtctctgtgtagcggctactgatgctccataaatatgttttggccgtcagacaggacgttggctgccagctgtgctgagttctttctgaaaagaggcaaggcagaggaaaatgagaacgaaaaattcattttgtcagcatggcagcggtatgcctgtgatccctgcactccagagactgaggcaggaggattgcaagtttgaaaccagcttgggctctacaatgagagtctgtcgacacaaaagaaagaaagagggaaaggggtgggtaggggagaaaaaaatggctgtttctgagaagcggctctgagctgacagttttgagttgggggaagcgcatcctgtatcttccccagaaaccttatctctagggatgctgtttgcaggactgacggtgctttagtctaagcttgaaggtgtcatcccacctcttgggaatctcaaacattgtagccaaggatgaccttgaccttttcctcctctttcactgccccagtgctgggcttagcccgcaccactgtgcctgggtttatttggtgttagggattgaacccagggcttcatgcatgctaggcaagcactctaccaacggagctatgcctcaggttggggactttgtgtctgccatggctgtgccttctctttgtttgctccccccaccccatgcctgtctgtggtgttctccttgggagatgactaattgatgctcttgataccacttcctaggtgacacacaagtacccaagtgccccctttccatctccccagcagctattgcagaactaccaccctgtaaaaattcagggcggcatgcggatgagagagagagaacacaggagaccacactcaggaccacatagggtggctggcctctctcaggccagacgttcccattggcaaagctgtggggaagaccccaagtagacctggactaagccacatcactgctgtggcaggaacctcacaaaaaggagaggagaacactcaatcgtgcattgtggtgcctttgaccccaacacttgggaggccaagacaggtagatttctataccttcaagatcagcctggcctatgcgggaagtttcgggacagtcagggtgatgagagaccctgtctcaataaacaaaaatagaagtagagaggagcttcagggtaggggagcacagcccgccaaccacctggcaaggcttcagttcacctctatgctcctgcccttagttggccctagacccatcccagtcccttgacttcagccaaaagagcatccaaatctactgtaggtggacctccataaggtccagaactttccaaggatgaccatgactctggcatgcctttgaagctaaagctgcaccctgtctccagaaagtgggcagccagggagcagattttaatcatcagcgaggaatccatctgtcctttttgaggttcctgcctcagcctggtgtgcacagagggaacacatcacctctgtcagccttagaagcatgctcttgttctccccattctacaggtgacaaactgagcccttgagagaaccacttcagggcctaaggctcctcaggctgtggactgaaactccaattagatgctgactgtaggaagccaggccctccagggttcacagcccctcactgatagccaggaagctccctcaaggtctatctagacttagtccaagcccagacaatttcatttggtctctgggatgtgaacatcactgaagggtctcaatctgcccttgtgattggatatgttgttcctggagtccagggcagtcctttggaggtaacctgaaagtgccattagcccaagttatgaggggggtcctgcccaggtctttggggcagagggctctgcaccactgtctgacaattgtgcccctttctctggggacaggaatctgaaatcccagggccaacacccctagggcccacacccaccctggtgatgctccaggcatcccaatatctggggaatccttcccagatgactgtaggcctcctgagctctctgggtttctacctaaagtctgttctattagagaagatgacagtactgatgacccaaaaagaggtcagggcagggtatttgcaggggctgtgggtacctggagggttagctaggtgtccagcatggtgagccctgtagaggctgagggctatttctgcccatgtcaccattttctagaatgaactccttggaaagactgattttgcttactatttaaattttgtattagtaacacacacacatatacacactttctggaagcacatggcaagactaaatcaagaaagcacatgtgtcctgtggaagtccaggacaaggatctcagtttgaatgaagagtattgacatttgttaacctgaggtgaggcagttacgtctctggtacctgacaaacactcagccttcatttaataatctcgtcccacacactctagccaggatgaaggagttggatggggaaatgggtctgtctaggttctcccagcacagaaatctcggagaaggcttgaccatcttggtgtcccccgcccccagccccctccagccttgcaacatgggctcaccctagcaggagaggagccccttgtttagcagcagtaccagggactgtcccagctgtgttcctctcaccttcagggccctctttgcttcagggcctcatcttgccactctcggtctcagaggaccttccctgtgcttgtggctttagatgatgtgaccagaagggcagcgactgcatcaaggaacacacccacctgactgtagtgttctttaaccccaaggccgaccttgaccctgcaccaccctgcaccttccagccccagcctggctctcctcctggctactctcatctctaggatgacagtcccgggcttccatctatgtagctgggtgaccttactttctctgagcctcaacttttccctctgtaaaatggggatggcaaggattaaaggatgtaacattatatgagacagacaaggtctggcgtctacacagtgagtaatgctcccatttgccatcattaatctcgctgtctattttgttgttctcgccatgcatcaccgctctgcgcttttgtgctcgcccctgccttcttctggggaggttccgaggactcctgtccgctctgtgaagtgaggttggtaccattgtctcaccagcacctgctccacctgagctcctcccggggtctcagtgggactccttcaactctacccaccttgccaggcagcacgggacaccacgcagcatctggggacaggtcttaagctgaggggcactgctgtgtgtgccctgcttggcagaggcccagtcttcctgctccaggtgtcttcctcctcccaatgtcctcctcctcctcctcctcaggaagactgactgacacttgtcatctttcttgacttctcagtcacatctcattggtatctatcttatccttccaaagaggggaccagctcttgaggacatgaattctgctgtgtgtcttggtgacccaactgagcttcatatagcaactctggggtgcagagcacagcttggggagcactgtcgttctagagattgttgagccggtgactcaggacccctcctcagaagctccggtgcggctttcgctgcttcccgtgaactggatagcagctccccctcacccatgatctcagcagggcccagcctggagcttctagcctttcgtggacacatagctctctcgctgcatttgaagaagagctgtctgtggaaaatggcacgtctcagacttgttggctggtggctctcagactttcagagcctccatttcttctatgtaaaacggcggcgggggtgccgtgttgtcaggaaaagttgtgaggtcctgctacataggggctgggctgacagggactgatcatgggtggtatgcaggtcattccagtccagcgagggttgtccagggactcagtaccgggaaagaatgcaggtcatcctgccctagagaaagggccacgcttggggaaagctatacgccttgtgatggtgtgccccaattatcaccttatttgaaaaccaaaatgggagtggctcagagcaggatgcaagtgattcagtgaggaccctggtctgaccctgtgtcctggtgtcctgctcagctcctgggaagaggtaggcaagtcagatgtggtggcttcagggagttttactggggctcctgggctggcctgtgcaggtttaatatggctgaggcatcggtcatttcatccctgagaagggtggtgagtaagccttgcctgggaggctggggccgctgtacacatctgtcttttagggaagagggccctgctgtgctgcttaaagtgtcacagacaagaatgggtggcctgtgtgtgactgatatgcatcctacacagacaccagctgttctgctgagaattggagaatgaatatgctttttattatatagtactttatgcacacaaagcaaacacatcatctatgggatgtcataacaagatgaaaccttgtgcttccccacacccggaagaaccagaacatcagcatctgtccttaggcttctccctccccaccccatcaccatctccttccacatgtgaccacatcctgattttcgccattttataaagagagacaggtggggggggggtgtctctcacccagtctggaactcactaattaggctagactgtccagaaagtccctaaagattctcctgttgacccttccccagtgctggagtgttaccaccacacttgtttgcatggctgctggaaatggaactcaggtcttagcttacaaagcttactgatggagccacctcctcaggccctgcacagggattccatgactgagataaaaagccggctggatgtatgggcccacacctttaatcccagcactgcagaggcagaggcaggtggacctctgagttggagttccaggacagccagggttacacagagaaacactgtctcaaacaaacaaacaaacaaacaaacaataacaaaagataaaatgtaacctgagataagaatgcccacaatacatttttcactttgcttgttaaaaaaaaaaaagagagagagatagtttgtgtgtggtcttctgtggtttcctcttctttgtcttattttcgagatgggggggggggggtcttatgatatagacttagctggtctggaatttactatgtagaccaggctggcctcgagctcacagaggtctctgcctgccaagagctgggattaaaggtgtgtgccaccacatctgtctttgttctttctattttttgtttctaagttcctcattgttcctgagtctttctatatttccttcattttccccactgtagagtagtcactgtgtctgcttccttctttttgtgtacacaggagtctctctgtgcccatggaggaaagctctccctccatacacttgccttggagtggagcagtaggtcctggctgttgaatgttcttagagtgatgcctagccattcccaaacatgctcctatctccttcctctctttcctctctttcctctcttccctctctttgcccatgatcttccaaagctttttcaaactcagagcccccgttgtcccaggtctcttaccagcttggcttctgcctcgcccccacactgcacatcctccagctcttcggagcatcatttggatggagcactaggtctcaaagtgtgtctcatcacactggtcttatgtgatcctgctgggaaaggcttctagggacaagtaaatttagaagttagccttgcttgttggaatctcaatgccaccaggtacaccacagaggtgacccttgctttcatttgtctagtctttccccaaaatagctagcccaggaaatcctcctgcccctttcaaaattcagtttggtttttatggtctttattttcccaactgggaggctgcgattttttgcaatgtatattttttttaacattctgcatgaattgaggaagtttagtctagtatctccatcgcttgggggtctcgagatgatgaatgaaaaagcataagtggtgaatgaaggcagcagttagagaagcagttggctcgttgctctgtggtccagctgggtctcttgtcctgaggagtcagaagctatggacaacttgaggttgtttggcccgtgtccaaccctgcctacagtgtttctacccagccttcctccaacacccacgtggaatgagtcactcccattaagcctcctgtcactggtttgggggcatctgtttcatagggaggcctgaaacccttgcaagggcagaggctctgttccatttgccccctaggttctcaagagtggctgcttaccctctggctggtggatgagtgcagtcggaggaggtctcctgtgtatccttgccagggactagagggtactatgacagtctgcaggctctggagtcagaccagatgagccctcatagacctgccagtctccacgcctcagcttgggaactgggcatcttctcttctttccacccacaattactctactgactctgggaacagggtctcactttgtagctctggctggcctgaaactcattatgtagaccaggctagccccaacaattatgacaacctcccgcctctgcctcccaagtgtagtcatgttccactgccctggctctttgtttggtggagttctgtttgtttaaattgagacaaggtctcatggagcgtgggctagcctgggactcactataccgtggaggataaactctgatcttcctacctctctctacaagttctgggattaagggagcacacttagttaatgtgatggtagagacagaactcagggttttgtgtgcatgaggcatgaattgagctacagccccagactgtttgtctgttttgagacagggtctcatatgtagctctggttgcttgccaagtaaataagacttgccttgaacttgtggtgactcccctgctgcagcatcccagatactgggatgtgcaggtgtgcaccaccatgtgtgacattgctgggttttattttgatcctttgttcatccctacaaactagaacccataacagtgcttggttgttttggggttgggaatggagggagcgaacctacaggtaggaacttgggaagcccaagggtagccaggactttcatggctgacccaggaagctcagtatcctgagaccaagatctctttgacacagcgtggctagagcgtcctgtgctgtagcagtgtcctagaatggagggctcacagggcgtggcttactgccgtggtcctcagcctcctgcacaggatggtgtgcgctgggagatgcttgcacacagaacatttgaatcacttttccctgggcttagagcgccaggaggtcagatagcagggcctgaggatgctagaggcccacttaccattctcaggcatacaccacttggccttgaagtcggggaagctcctcagacctcattaacctcctattgtaaggagcctcaccagctccagagcacctgctctcttctcttcgcactggtcagccttagttctagatctgtcttccctggcctcccaacagaagagatagatcgtggggcactgcagacaggctgaggtgaacgtctgatgtgacacacggatgcctggggacgttcactggggagcagagaaacctgggcatttatttcatcccaggtaacgagctgtagtcccctccacaagggagaacagagcaggggtggttcagaggggtggaggcacgtaggtgagattgccaattgggtgtccaagaggcaaagatgtcattgaaatgacagagccagagaatctagtagagggagactgagatctttgcggcagaggaaggaagacattcaaagcaattcacagaccactggtcttctgagagctcgggtagtgtgagaggggaaggggagatggaggtggtggtaggctttatcctttctgcagcggtacaagctagaacgcgtggtaacagggtggtatgaatttccccagaggtgtggaaggctcctgattggtctgattcctcagcctcctcgtgagacactccatcaggttggacctgaaagtactcagatccctgccaaccgccatctttcagactcacagacagtctccacattgctgcctgagggatctgaactcagtagctgactgtcacccctgtctctgtccaccttgaccctgtgtgttggtgtcctacttacatccctatgtccaaggctccttccttttgagagcagagaaatgtacacagagcatccccttttacctccttccttcttggtccaggtcccacccactgggaataccctggatatacctcttttgcccccagtgtgtgtaatacatcaagggttacactcggttggaaggaaaaaatgattttaaagcaataacagcaacaacaatgccaagtgtggtggtatctacctgtcatcccagcatctcggaaactaaggcagggtaatttccataaattagcatagcctggtctgcatagtgagttccaggccagccagagctacacagtgagaacctatcttaaggtaatataatttaatataatataccactcccctatgtgttttgcaacccatcctgccatgtggcccctttctgtgggttttctcagctctgcttggaagttgcctgtgtccttgctattgtcctttagtccctgtgtgcatagccctgttattagattatacagtcctccgggtgaggggccatgacagcgttgagttagtgtgggacacattttgggtgcagaataagtgaattctgccagaatgagtcattagcggagagtggatggaggccgttagacacaatggcagcagcataggaggcgagatgaagccattcagacccctgtaccttctgagtctgccttctcgttggtgcagtgcattagcctgaaccccttggagcttttgaaagaataaatctcaatgagcaggttctggaaaacagctttgcagtctcaaaggtggccagctcccctgagaagcccacatccacactggttccgagaaccctcaccttctgggcttgctatcttggaagaggcccagtcacctagaattctctgtggttatttgaacccatgtgtcaacccttctgattctgggacagagctcttttgtctcttgaggatgcctgggacatggccctgctttgatacagagacataaacatcaagggtaggaaatccacatcaacattcaagagagaaaataccagtaagaaggaaggctccagtgtgagtccagcactcagcctgaacaacaagacaggctgggtgtctcagctctccactgacacactgtagagtctcccaccccaagaagtcccttcttgctttcttagcagcctcagtatctccatcaccagctgtatgatcccaaacatattacccggcctctagaacctgtgtcatcacctgtcaagtggagataataatgtcgttgggttccttggcaaattaaaggatgtatttcatgtaacgtgctttatatgataccgggcacagagtcagggctcaataaatgctggccttcacaaataataaccattgtgagtgccctggagatggtttcaccccctccactcccttacaccagagaacaggaaatcatttcctcacggccttcttaacaactgtctccccaaataagtgcaccctatattatcttattcaccctgagtgtgcacctgtaaagcggcccctttattccatttatagctgtttccacaaagaggcccccattacctcatctccctctgttttgtgggctcctcctgtctgtggccactcagggccagtgtgggttctgagggagccttggccacaggtctgtgttggcatctgccctcacgcgcacacacacacctttgtagaaaagtctataatttcttcaagctttgtggcacatgcctgtatatctgtcaattcaaaagactgagacaaaaggatagaaagtttaaaatgaactatatgtctttaatcccatcactgaagaggcagaggcaggtggatttctgtgaattcaaggccagcctggtctatattgtaagttttagatcagccccgactacatacattctcaccaaagggggtaagaaaatgaaagctcagagtgggtcggagagcttagtaggactatctatctctatctctatatccatatctatataattggaaagggctgaggaggaatagccttgcagttcagtacttgcctagcagtgtgaagtcttgggtttaatctccagtactgaaagaaaaaaaaaatctattggaatttctttatttaaatgtgtgtgtgtgtgtgtgtgtgtgtgtgtgtgtgtgtgtgtgtgtgtgtatgagagagagagagagagagagagagagagagagagagagagagagagacttttgtatacaaagcttgttcttctccagaagaaatacaacaagacatcagactatagaagcagaaatgcctgaggtatcagctgggccctgcagcctcctggggtgacaagattgggcacagtgagaggacatgggtgaacagggagggctcagcctgcagaatgtatcctttccccgctgggttatgcacaggaactcagaaagatgtgggtccctgtaagaggcacatctggagaccttgaacccaaaacttctgtggacagccagcatgtctgggagctcctgtactcaccaacatgtaaaccccacagcaagactcagcaatctgggtgtagaaattaggagaagggaaaactctcggaggaagagagatgcaaggaggaatgtgggcaagggggtggggtcccccaacagtgccaaagacaaggtttcttttgaaagttttttcatggtgaccttccttttcgaatggatgttagttagcgagcggttagcagtgaggctcttaaactccaagcttggagccgcctgtgatttatacctggcctatgtagatgagggacatgcccaaacacttttcgctcatactgctgatcaaaaacagtttggctgctgcggctgtcaagatggaggcttgagaaacctggagagctagaatgaggaaaacaccaggcttgggaagaaaggaggctgattctgggtaccaggatgtacggcgtagggcggagcagatagggcccagcgctggagccccatgagcggtcctagtctcctttggctcttggcttgctccttgaaatgaagcgaagacccactgagcacccagacttctccatcctatggtgcagacatcagactgtgaattctgtgtgtagccagcattgaggctgagctgcccttctctgagtgctagaatacctagcgggagtcccgctagcagctaggagtgtggagtgggcactcacaaacccagagaagaaaggctaggcttggtggagaaactggaagcaggagcccaagactggtggatgtgaccgtgtgggtgcggggcagggggtgcgcaggaaggtgttgaggctcgctcccgggaatgggcccgggagggaggagcaggcagcgctttgaacttgcgctcagcctccagaaggagggcgggggaagtccaggtgccggccgggctgctttcacctgcggatccttggcgctttgggggacgaggcgcaaggaagacctcctgggaatgcagtggaaatacccaccttgaaaggcaaggagcgggaacatagccctgagcgccgggtgtggcgctgctcccgcccccatccctacccgcctcacgctgcagcgcgcacctgctgctggtgctggtactggtgccagtgcccattccagggcctccccgacctgttggtgctcccagcatctgagccatcaaggttcctgcccacaggtttcatctagaagtccccacaaatgagttgggagttttctattgttcttcaaacttttattatggcaatcattaatgaaggctgtggatcttgcttggagatttagggctggcagagcatgctacaagggcctgatgttcgttcatcatcacaaagcagccggggaaatgaactaggaaagtcgaaaggggggcaggagatgtcgctcagttggtggagtgcttacctcagcatacctgaggccatggttttgataaaccccatcctacttggatggggagtcagaaaggttatagctagtcctgggtcagtcagcttattctacatagcaagttccaggccagccagagctacataacgaaaagtagaggaaaataatataaggagcaagagtttacacaccttatagtgccaccatttaaaaatgttttaaacgtgcacgtttgtgtcaaacaattacaaagaaaattctattccgcatgagcgctgagattccgatatgtaaggctgcccccaccccatcaaaccgccatgctggttaacaagacgtctaagaattcccgatgattcaggttgcctaggtgtcctcctctctgcctttacccaaagggttttcaacgcaggctccactcatttcttttcccttgtcttcattttaatctcaaagtaattcattctccttatgcccaatacactggctcttcagagagctatggtttgcagtctttgatcatgtgacctgttctcagatcatctgcctgcttctttagagtcatatgacttgtgcttctgtctctcgtcttcctgacaactgagggttacttaggcgaaccgtctttggctggtgagctttatggaggaggttgggtaccccacattgcgccatctccagccatccagctctcctgcttctttggaggtgtttaatagggtttctgagtctctttcccagatgggctggtccagcgggttaggactggagtccatgtgtctgggttttgcaaatctgcccctttgctggctgtttaagtgtctcacctgccttcctggcctcagcagtcagctgggcagtgctcatcctgggccctccaaagggcatggggagggaggtgtgggaaaaggtgagttctcatggctctggctcagcagatctgaatgtctggatctgggagttggtagttcttatagattataaccacgcctataaacatctgtatgctctcaacatctagcacacagctggcccagtgtaattgtccctgaaatgaagatctccaccaggctggtggccctcaatgagcccctagaaagatggtttctggtgtgagcttccagccaataaatagctcagctttctgcatttgaagactcagagaaagacttccccagggtgtgcagcagttgtgagaaaagtccagagagccagcagggtgtcttctgctctcagcttgtcatggcagtagcctgagtggggaggaaagactggggaggtcagtgggagcctctgggtccagtccaagggggtcctgggcccattagaaaagcagactctccacttaagtagtcaccggtgagggagggaagttgtcctctgaaaaacctcaacttttagtggagagaacggctctgtagacagctcagtagagaatgttcaagatctatcttcttctgacaagctgaagagatgaccaggaggaacagtttcaatccagaggggatttttctaacctcagatcttgaggggtgactaggagctcaccgtgagatgaatggccagggaagctgttttgtctttcaccagaacttggcttgaagggaaagctctatgagaactgggaatggttctgacctaggaaccagctgtctgctttcccagaaccattagccaggccctgccaagccctcacttcactgcacgtgggagactgccctgccggagagggtcagcagggaggaagtggtacgccgctcaaaggaaccaatgaagcacactgggcttaaggaacgtttatagttctgattggcaggtcagtaggcaaagaaataaatggcagagcccggagagaaaaggatgtgacctaatcaagctgagcttgaatttcaagccgaaagcacaggccagccagctctcagcctctctcccctaggcactcctggcttttagaattcctaccccaaacgggactcctcacacttggtcaactacagattgcctcttctgcgtagaatgggaggccccatccaatgtatacagagcaggagctgtgctggtaacagaaggcgttccagtgtgctgacggaggctcggtgaggcacagaggagttctgtgaggtacgaggagatggggctctggctcgaggttcaaaggcctggaccatcctcctttcaccttgaaccagtgaaggacattggatgagttacatcacttaagggggggggggtgtgcacagcttcccctgagaaaaagaagttaattgtcccaccaacctttggctttgacattttatgacttgatgctttcatgagtagcctctcaggcagctggctatgggaccatttacaggaggcttcgagtggctttccagggcctcttacattctgtctctcctccagcaagacataggccagccagggacacttttcaggcagaaacttctgctcagcaagcctttattattgatcaaccttcacgcagaaacccccgttctaactaaccatcgcttcagggagggtggacatgcccccactagaaaagactaaatgcagtctagcacagtcatttgcaactgcaagcaacccaagcaggcctttgatccttgatcatcttccctgtgaaacagagcctgcctaactgtggcctctggggccacaaaggcaaggatcagacctgctcagtgggggtggggaagggaagaacatggggactcacttgggaactgcttggttagaggaaatgactcagtccttgccctaacctcctggaagccctgtctctgagacagctggcacttctcagagagaccttcttggggtctgaggtgagaggcccctgacctggacctgctatctggatgttctgggctgagtttgcttctggtaagtctttctagagaaggtagactaggccaggctgcagaagcccctgtctccttctttcttgccttccactctttccccttccaattctctggatctctccctctcttcgtacagttaactaattcccttacatcctctttaggacccatcagcctgcttcatgctccaacccctaatttagccaggagggacagtccttcctccgttctccactgtgatcaactcccccttcctatgaaatggggtgggggtggtggctcatgctcaggacacctcaaaaaacaggtttcaacatttcacaggtttcaacatttttcaggcggacttgtcacacatcttatcagatcagagccttgcaagcaagccctcttcggcacagagtagatgccggtacattccagtcaggctgggctccctttggtggaaagggtccacccagcttcttagatggaggcaggatcgataccacttccctctgatagggtcacccctaagagtgacccccgactgcatgtttctttccatatcatcttcttcgtcccatagatgcccagaatcccgtctctttggggtccccagcaagtgcactgcttcctataaaggttccactgggccctgaaaggagcttctagaagtatcgggtgaagatgagtctctggggttacttccagagtgtagacagtcttttggccagcagagccagtaagttctgttgcttgagctccaccgggacctcaggaagagaggaagaaggtcaccctgccctgctcaatggctgcttccttccagaaggaatggctttgacattggatttccctcttcacgcctgagagttttgccccatggtgtgggttgccagcctggtatcaccctcccttcatgttctccaaaagactctgcttccctgctcctgccatgataatgatagccttggcgacgtggcgaagacgagccaaagcccagagtctcagagttcagtctgagaagcacacctggaggctggtccccaggccacagagagcggctgagaggccaccctgggggcaaactccactctgtttgtcagaaaggagtctccacgggaggacctggctgtgatggcaagagctctcacctagggaggaaacagacaaggaacagagcagagggagagatattgtgatggctgaccacacgtgcaggctgtttgcctctgtaagtgctgatgaaacgggagccaggaacacaggcttcagccctagccgtgtgaggtttgggcacaccatgctgttccggcgtcactcctccctgcctggtatatgatatcaacagtcccaacctgagatttccagctagctcagctttcccggggaccttttggaatcttcaggtctagagtgcctttccactgtacctcctgagcagctatcctcaagaggaaatgcctgccttctgggttcctctttgggctctgcacttggccatggtcttcagctgtcactgtccccaagggttccttttcccattgtttctagcctcttacagatgccatctccatggtcaccctcgttcagaccttctacatcccttctctttgtccttatccacagccttctctctgttccctgaagccttcatcttgcaatggccagtgggcccatccaccgccatagcctgttagcctctctggctcacctgaggccagcgacaccaaggcctctggtggtatcgatgtgttgccaggtcctcgaatctccttagtgccaactgtcacaccagccttccatctgtttcctagcttttgatctctagtgctgcccttgtcccattgtaggtgggagatagatcaacaaaccaaagtccagctctggatgcttcgagctctgccagcttgcccagagtggtataaaacctggcaggtggggccccttgccagcccccctcctcctgaatagtccaagacgtcaggtgagtgataaatggtaacatgggtacaccagctgttgtccccagcctcctagttcgaggctgctctctgttccaggtgcttaagtgagcccagctttaatcaccaggtgtgtagctgctcctgatcacagcagtggggacttactggccccaccctgggagactcagtgttcttccctatgctatggtaacgatgactgaggacataagtgacaagtagccaaagatcatctcctgctcacgtgtggcatccacagtaccctgatctggtaggtgcttgaagagggctcgttggcctgccgttgacagatgtctcctggcctgggtgctcctccgtggggcttcattcatctctgtgttcctagcacctggagctctgccaggtttggagtcatctctcagtaagcgatgttgagtgagcagtcgctgagtgactgtgtttaccaaggaaggacttgagcccagctgccgagaccaaaccctccagttgcttatcctcgcaggcccagactcaggcaaactggaaactcagccctgccctgggctccacccttttcccttcagcccctgtaatgtgagctaaagttatctctgttcccgatggatccagaaaggcagatagatataagggatggagagaggtctgaggacttcccatgactgtgaagggcagcatctaggttccctttgtgaactgacagccatggtgtcactcggaaacagccccttcttggtcatacggtgctgggaaaggtgtagttatgtgcagagggccctgtgtgttccagatcagcatggattcttaggaaaggtggcggcagatgcatcatgggatttctccctccttgctctttattgaagcttcctgccatggtgccagggctcacacagggcccgtagagactctagaagctgagagaaccctggcccaccagactcagctccttcccagtcctgagctttgtcctctcccttgtaataatcagcagctctaatttccctaagtggaacggcgatacttgggttctttttgtccatttctcatgattttcttctggcttctagaagtttccatattgcccaggaggtagagttctactggaccaaaagtgggttgggcttctgtctagcattgcctagaagtcagcagacagaatacctggttctgtgcccttatggggttttgggaaaccctctaccttcgtctccctcccaatgcctgggcattttatttcatgagagcctaggcttttggatcagaatcttgtggttatctctgagatcaggtgggtggctacttatcactgtaagaaagagaagggcaaagaatccggtgctcccaagaagagtaagactcatccaaactcatcccaagactaatagatgagccagagaccttctccctgtgctgtggcctggaaatacactctgtccactctgccaagtcccagagaagcttctgaaaatgtgtctttatcacaccctgggattcacaggaagggacagagaaagagcttgttggcatcgaggcaggggtcgtggccatggctgctgacctttctaggcaactgagcttccccgtgaccctagctcagaccagtgcctttctgaaagttctctgaaattaagggattcagagctgaagagatggctcagcggttggggacactgactgcttttaaagaggacccaggttcaaatcccagtgcccacatggctcacagctgtctgtaactccaagacctgacactctcacgtagacatagatgcaggcaaaacaccaatgcacataaaataaaggtaaataaataaaaacttttatagaaaaaaaattgagggattcaggtagactcggtcctggtcatttcagctattactaattgtataaatcagtgcattaggtaagttccaatgtcaggcaactaccactattatttctagaacattctcttcatcctaaacagtcattactgtggagtatgagcctacgccgagactgctggatcctgtggtatataacaaattctctttttaaatgttgtatatagaggaaaaggagggagtttgtgcttgcatccgtttccaaacaaaaatagttcaccattaaggcagcctgaacttggtgacacccccaccagcattcaccatctccctaagctctaagagcctgttgggaagctcaaaacttaaaagcaaacaaaacaagctaggctgggatacagagaaggctccctggtaggatgagcctggtgtaagcagacagagccagcctgatctcagcagggactcagtcatgcagagggatggcagagtctgtgggtctctaaggctccaggacacctctttgtaagtccctgcagcagctaagctgccctgagttctctgactagagatgctggggctagagatgctggtagactgccttctcagcaggcacaaaggcctgagtttgttccccagtactgatttaaataccataaaatcgtgagaaatggacaaaaagaacccaagtattgcctttccacttagggaagttggtactaaactggatgtggtggcccgtgccaacaatcctggcactcaggtagagccaggaggctcagaaattcaagatcatccttggctacgtagggagttcaaagccagcctgggatacatgaaatcctgtttctaaaacaaaaacaaaacaaaaaaagtctgtatttcatgaaaagtcttatatatgtatatatacttctacatttgaatgaagtactaacaagccacgtatgcattctttcggaactgctgcagatcttttctccattttccttctaattaattacatctgtaagtaaaaaaatatgaatcaacccattggaatggttatgtcgaggttggatgagcacatctgcagtcctggtactcaggtgtctgagacaggaggattgcaaagccaaggcccgcatgaaccacagactatggccatgtctcagagcaacaatatcttgggctgtagtagctcagcagtagagcccttgccttagcatgggtaaggtcccaggctccctctgcagccaggaaaactgtctgatcttgtcaccatgcacacccacccacagccctttgcagaacaggtgacaaagaactgggtgtcagtgggaagctgacagggccatggggatgtttacagtctggcctaattggacagtggcattggtcgctatcatcagcctaagccttcctgacatctatggctcatccacctggctgcttgcgtctgcctgggcctggatggtaggtggttgggatgaagacgagctgtccctggggctgaagacaacagaaccttgggtagagcagggcaagtcggggacagaagctgggtataaatagtccctgcccagctgggcaggcctggcaagccctccgtcctccccctcaccagctgccagtgccagccatgccccgacctcctttgggagcctggtcaccatctcagatcctcactggaggaagtccctcagcggaactgaggagtcttgtcctgtgtgtgggcgagacctccggctgcccgagtgggggcatcaggcaggctcttcggggtgtcctctattttcttaactggaaggccaagtgtgctggtgtatgtgtgtgaaaaatcaatagctattcctctttgtgtgtgtgtgtgtcatgctgcaaacaaatgagccagccttctgtggtgagaaggggagaagagggtacggggacactagcaaaggttacttctagcttgggagctcacagaagtctttagaagtgattcagggaaagtttgacttgggtatgggctgcagagaggcactcaaggagagggctcagcatgcgtgaagggtgtgaagctgtttcagctggcctcaaggcaaatctaatcaaagcctctcacagtggggagatggagaagatcaggagcctctcctgttgactctcccaggggcacaagctcttctgtaacggggacaagaagtgggttacactgatatgtctgcagcaatggaatgtcagccatggtgtgtgggcacggctcagggccggcagggcatgtcaggggggacagctgtcctgcagaagtcaatcccaaggccatagcctcaaggctgtccatagatctgagccctgtccccagaggccctagctaattaccacaggatatccagatagagcttgttgagacctctgaccggagcatcctggaaaccctcccatgccccttggtcagtttgaacatgcatccaagtcacacatggctttgctacgctcagcctgtcagtcacagagggatttgcttggccagccctgtcaggactgctggtgaagagactctgccgtgtcttggagccttcctcctcgtgcttgatgggaagtggctttagaaattctgatgtgctgtatcaagtcagggaactgaggctccgggaaatgaggttggcgacccggcagggaccaagtcctgagagcatggaacctgaggtggctgccattgcttgagggatcctgatgtgcatggcactgagctgtacatgtttactcttcccgcaagctctgtctcacagtggaagaaagtgtggtgtggagaagttaaggaaatcgcttggattggcagcttgaggcaggcagagcccgatgtgagctggggtgaagagacaggcttggaaggaggagggaacctaactctgggtgacaagtgtctacactgaagcccttgctggggtttcctttctagtgtcagtagggcttagggatgagtggcaggccagggctaagtgctggcttagtgtgtgagaatgagcttgatcaacaacactgcagagaaagggcctggttgggggcaggggtctgtagggaaggaagagaaaagacaaaagacatgccaagagggaggctcaactctggcactttacgacccacaggtccaggcagcttacttagctcccttgcctctgtttccccgtctgtgaaatgggatgatattgatgatgacactctctttacctcatagactggttgcgaggattaaatcagttaaagacgtaaacatttcaaactgtgcccagctcaggtcagatatacatccatgttaggtgtttttgcggggctcccctatgcctttatgtgctgtgtggcttcaggcgctaggctcaccattgtttctcactcaaacgtcagcccaccagcgggtaggcaggccaggcctgaagccacccagctccctagggacccagacaagcattgcccacgaagcagagggaaggcttgcctgggagccaggtagtctagtttctaacagcagatagaaactctataatctgggcagctagtaaagcccccactgtgtgctgggttgttatcaagcaactcaaggaagttagtgaagagttggtagtgagccgtgatggtgtgacactaatgcttcagtggtcacctcattctttttctctcactcttggccagtcccaacaggagacagtctcttgtagcccaggctagcttgcacctcctgaccctcttgcttctggctcccaagtgttcagggattactacccaccttcctagctttcccttgtcaaaagggcccagggctctggttggggagagctcagtgggagatcagttgtctggcaagcttgaggctttgagaggtggggttggggactctaagctcaggacaaggttcttcaaggccaccaattcaaacccccagttctgcctactcgcactctctcttcccagtggggaaacctggacttcatcccctgacagctgaggccagaggctgctggaagtggtgctgctgtgtgccatgttttgctggagcctctgagcagagcaaccgaggctctgggtgttgagtgtgggggaagggtgttgggaggcagctcacagcatactctgattagactctgatgagccatatacctgttcccaagaagcctagggcaagctagtttgttctggaaacccagattcctcatcaggggacagagatgatcaaaagctgatcaagtctgttacatccaaagttctaagcaactacagagtccctcaatggccgcgttcggttcacccatgccaacgaagcttttgtgtctcttctgacctaccccagagtttgcccctggccctctttccaaggctcctgcatccaggacttgaccttagctagtgcctaggtctccttcttccaggacactctgccctttattatgagcctggaagagggaaggaaaaggtagagtttctggtagtgccttgctttttctacagtagttaaccctttcccccccgagtgtacttaccggcgctgtaaaatcccaagggttgaaatgtaagaggtacaataatggggtggcttgactgaagtgagaaggttggggggatgcctgctgagagtttccttttgctcttgagttaaactagtcatcaaacggagcctctgtcgctagtgagaggggaggtggcactctagaaacttctagggaactataaagatggtggcggaggcccttgtagacagagcacttgatgccatcagagacaaacaggctcttggtgtcctctgtactcttggggaagaggctaagagggctttgtggggagagagagagagaggggggagagagagagagagagagagagagagagagagagagagagagaacactgtgctaagacttatgctcccccccccccaagatggagctgtgatcacaatggcctctgcttcctttgtcctttatatttggattccttcccatgaatggctgttagtctccacatgacccacgaatcctggagtccctgggagattgctctgcaggagccctgccatctctaccagggcaccggggcccaggcactgggcagaacttgattcctgctccaattcttcatttccaacccagggttatttttgtggcacagtacagacctacacagtgccccctcccccagaggctctgctgctccacatgcccatgtcagagggacactgcttgaaccggtgccgtgccctttgtgggacaccgtgtccccaaggaaagtcagaaagcagcacacaaggtgccaggcttctcagagccacggatcatccctcccccaccccagcccatcctctgggaagaagtgacatccatactaggccacgtgttctgtgtctacagtgccatctccattgtctgcctgcaggtccctggccctgggccagcagtacacatctctggcctcccagcctctgctctgcggctccatcccaggcctggtccccaagcaactgcgcttctgccgcaattacatcgagatcatgcccagcgtagcagaaggtgtgaagctgggcatccaggagtgccagcatcagttccggggccgccggtggaactgtaccaccatagatgacagcctggccatctttgggcctgtcttggacaaaggtacttgcctgagactcggtgggaggtggctgggagactgggggtggtgggaagggttctgggaccctgtccccttcctcccactgtgggaaaccctgagtccaagttctccctaggagggtaataaagctggtggaaagtgggtggggtccatctctggacaggacaggctgtgtccacatcggctacatcttttctagtgctacaggggggtgggtagccctgaggtgccccagtgtcctgagattggagggcaggcaccaaggagcccggagccttccttcccggatgacacagtgggggcccagtctttgatgtagacatgtgtgacatttcccttatgctgtgttaagtgctatgcaaatacagcttgggggtgggggtgggatggtgccaggcctaggtgttgtgccatggaaaaagtctctatgctctgtcaaagctgtctggtgctggtagcactacatgacccccgagggtcccctgagagttcctgttggttcccatagcctgaaagcaagacgcgtccattaaccctgatgtcctgtggatcacgctcggtgatctggaagtctgaccagctgtgaccctagtggatgaaagccggcttttgactttgcacatggggcataggagagggttgaatggggtaactgctcctaagaaggggactttggctctagaacctctcctgtccaggaatttaacggccttagctgggctggcctcgactggagttttgccagccgatgggggcgagcctgctctgagaaggttcgtaaaagctgcattcacagccaaaagggaggagtccgagagctagcgggagggtgggcgcagagtttgggagaggggagctatcccccctcctttggagaaagccctctccccctttacctgtgcttcaagtgcaaagtgtctgtacaacctacaggcagaaaacgcaggctattgtcgtgggacaggagggcaattagcaaatcaatggatgatgattctgtttacgcttctaataccaaagctaattattccttgtttacataaaaggtttggcctctaattggggccaagtggcggcggcggctggcttttcaaaactgatctcgcccgcctgttggtctcaccgccttccggcgccccacctcagtccaggtagcgtttaatcaaactgccaggcgtcccgacgcctcccccaaagcaacactggccttctgatcactcctcccacccaggatagtgtccatcgagacctttcagcatgatacccgctcgcagtgggtctgatgtttagattcgcagcagtgggttgtgccacatgcctccgtcccacagcaagagggcagtttgtgtcccagtgtgcaaggaaatatggggctgagacagtgggatttgatgaaggcagtggggtgaggttccaggaagatgtacccgcgtcccggtaccctgtgggcaggcggtgggtcctggccacttttgcgcacgtcctagcaggtgcggggtgggcggccggaaggcgcaaggccgcggtcctccgcggctccggagggttcgagcgccgccccccgccgcgcgcccgctgcggtcgccgcgcaattcacacgccctctggccgccgcctcccggggatcgcgctgcccggcgccggggctgggggcgcggcccggccgcgggagccgcccgttgctacgcggtggcggccggcccggcggcccgggcccggcggccgcattatgcgggtaatgcggtgtgacaccgcgcgaacaaaggcggattgagcggcgcagcgggtcccgccggacggggaccggcacagcggggctggcagcgccgctcccaggctaatccccgccccgcccccgccacccccactgccccggcgctgggaactgagcgtggcggggccgggtcgccggaagccaggggcgccctcccctggggcgagagggccgggaggcctggatcaccgccgtgcgcagtcccccccggcttggctggactgctgagccagctctcgctccgcgctccccgccgggctgcgggaaaagtgggacgcgcccctgctgtgcaggtggcgcacgagggcttcgtgtctgcaaaggctgctgtggctctgagtatctggttccctgcatattcagcacgggccacgacctaggaaaggagatccggctctgaccacctgtgcagtatagcacgacccgctctgggaacctataaaaagagatggcccgggccgttggcctcgcccggccctgtctgtaaaatagggtttagaacattgtagggaataaagcacaggaaagacagatctgcgcgtatgcagtactcagggagtggctctcattgtaacaaggctggtgatgcccgctgagactctcatctctgaaccctgggcctgaggccgagaaactgccttgtctcgaccctcgtggcttcgtaggaggagggcaagaaatgggcagccatggctgaagatgctgcacctactttacagagtgtactgtgaggcacagatgagaaatctgcctacggggaactgaggttcgagtggaacgagtggattagtaggttttaggctgcaggttccagtctccagaatggaggactcagaactgttaggaggagtgtttctgaatgtgcaaggttggaggccaagagcccaaggacagggcgtggccaacctaactcttcagagagcattccggtcccaccatagacccctccatcttagtagccctgcagctctgaactcagcttgcccatccacaaagagaatactaactagggtctgaactctttagagcaacaggagggcacctggctctcttcccccaatgactggtgagcctttgcgctcttccccagccctcagggcaaggctgtgtatgtaccctaaggctccaggctgaacatcttctcacaccatccctctgcagccacccgtgaatcggccttcgtgcatgccatcgcctcggctggtgtcgccttcgcagtcacacgctcctgcgctgagggaacctccaccatctgcggctgtgactcacatcataaggggccacctggagaaggctggaagtggggcggctgcagcgaggacgccgacttcggggtgctggtgtcccgggaatttgcggatgcgcgggagaacaggccagatgcccgctcagctatgaacaagcacaacaatgaagcaggccgaacggtgagacagcgacccacaactcgggggcgggaggcactccctggacccctgccttcacggccaggttcccatccacaccccatagtaaccccctgaccaccctccttcctctcttccagctgtcctttgaataggttttttaaagtatatttactcattctcagtgtgtgtattccatgttgtgtatgtggaagtcagaaggcaacctgtagtggtcagttcttcccaccatgtaggtttccaaacttgaatcatgcttgatgctgttcctggatcttttgagaaatctgccaaggagtgcagtatggctgccccataggaacaacacccataggctacactggttggcaggctgtgcctgtgtacgtctgtgatgtggttgtgggttggggactgactctgaatccaaagtagggtttccatagcatagcccttcctatgctcgtggaacacttagctctcggcctcagtttttccatctgttcaatgggaataacagtccctagtttgcaccacttctatggatgaggtgaatgtgaagcctgctggggccgggggtgtgactagggacactggtttccacccattcttcctggcaccaagtaagagtagaggagggtgtggtacagaggggaagctttctcccggtgtgtcagtctgaactagctgctgcccctctttccctagaccatcctggaccacatgcacctaaagtgtaaatgccacgggttgtccggcagctgcgaggtgaagacctgctggtgggcccagcccgacttccgtgccattggcgacttcctcaaggacaagtacgacagtgcctccgagatggtggtggagaaacaccgtgagtcccgaggctgggtggagaccctgcgggctaagtacgcgctcttcaagccacccaccgagagggacctggtctactacgagaactcccccaacttttgtgagcccaacccagagacgggctcctttggtaccagggaccggacttgcaatgtcacctcccacggcatcgatggctgcgatctgctgtgctgtggccggggccacaacacgaggacggagaaacggaaggagaaatgccattgcgtcttccactggtgctgctatgtcagctgccaagagtgtattcgcatctacgatgtgcacacctgcaagtagtgagccaggtagggcgcggggcgggacgtgggactgccctctcctcccatccgctaggcctgctcttctgattctcggcttcccaagacgaacaagttcccaaagctgaagtcagaaactaggcttcccacgcttccacgggaatggtcttggggagcgacttgacgtatttacacgaggctcagataatgactgagggtgtgcacgtcagccacaagcaattgattaaaattcttacacaaattagcagtgatgagccagaccagatttgttcatggctgctggctgtcattagtgagcatctattcggccagaagagaggttgaggtctggtcccagccatgcccctaaaagtgtcatatctcagggcctcagtttccctactgtctaaaggagaggttcaaatgtcagaaacaggggcagggtatggtgggactggcctttaatcccagcacttaggaggctgaggcatctggatctgagtgtgaggtctggctggtctccatagagagttctaggccaggactacacagtgagaccctgagacagtcacctagtaagtctctcctaaccctggggcagagtcatttcacatcacccatgaactgagagggcaagctttgacctaacacaaatcctccagagcttgggaaggtgggtgggggaagccagatctgaagcttgggtggagcgggagcactctcaccaagtttatggagggagacaggaaagaggagagctcccagttcagagcggctggggtgagtgaccgtgggataaaagcctggtggattatgcttccaagcttcccagaggtggcctgcatgcgtgggaggaccccaagaaaggtcagcctggaagcagagtgatcctagaggctctggcatgggccagtgtgacccttgtctctgtcccctcccctgagagggctctgctagtgagtctgactctcaactggcttttcttatttgtcaaccaacaactctggcttcagcatctgttaccttccccgagcagctgtgaggaacgtgggaaaccacattggttcctggaaaagcagctttctgtccatctatggatggccagcgcagtgtgttccacccagggaccttggagctggtgacacaccagagctggtggctcatgtctgcgctctgtaagggtgggggggtacctgacatcacaagcccatctaagaagttccttgtggggcttaggttccattcccagggtccctctagaaccatacaggaggcgtgggttttctttatcaaggtcaaggctggaaggaagacagcggcgagctttagcgcttcacgcgcccactgctgaacctcgctcctcatctgcgcagtgatggcagtatggggatcttgatggatttttataaagctcaagttagtgggtgtgaatgctgctctaagtgtcagggttgccatcagcgttagcacggggttgctgcaaaggaagatcccatgggcgttctttctgcttttcaaagggatgggagaaaagtcagcaagtaggaaggttgaggtggaaggaagcagaccatgacggccgccttctctggtattcactctgacaagagttagccctgcaccccccaatatcagatagtacatacatagctctggccgttttgaggagctcttggtgtggcttcttatcactcagctagaagggccatttgtcctgaccacccatgtcactgaaggttagacttgagttaatggcctagatagacccaggggtctgcttccagaagcttcctatgtaggcttgcataggcctcagcattgccaacccaagcttgatacatggggcagtgtgggtccaagatacagagcccatgactccactccgtccttgcccatgtgggcagctgagatcttccaggcagggaaggaggtgcagggtgagcctttgttgtccagcaaatcgctccactccaatccttgcctaaaaatgatctcctaagaagaattgggtgtagctgggtagtagaacacttacacccctgaatcaatctccagtactggggagaggggaaagcagccccctttcctcacattcctaaggtagacacttgctgtttttctagtatcatgcagacatgtttttaagaagctatgcccacagagttcacagccttaatcccttcccatggggtggggggtggaggggggaggaggactggactctcaacctcacacttcctgataagaaagatccctcccactgggatgtcctttgcctctcggagcccaggtttcctcctgtgtgaagtgataaggtctgtgccctgcagggctgctcaggagccagacacagccataaagagcctgctctgggctcctggtttggagccataggccaggagatggttgagacctggttccttcctgtcctttcacccccgaaggcgctgctactgatggaagccaagggacaaatgggcagggagacagcaggcatagaaggctctggcttttttcttgcacaaaggggccacagagcagagcccagcaggccacatgcccttctctgagaagagttcagcacagtggtagcatccagtcctccctaagtggggaagacaccttctccattgcttgaggtttgtccactgtctccacttagccactagcttggtatccgagtgctggtagtttacaaatatctgatttattctttttatccctatgtcggaaaggctatgaatctagtcaccccctctaactggccctgtgtcctgggtctgttactagtcttttgtgggaccttaggcatatccaggtcgtcttgctatgcctggttcagctctgccagcagcaccagagatgagggttggctgggggttggggggtgcctggggcgtggctcagtacctcagatcccacgggatagggctgtacagagtgatcatgctcaggaaagcaccctgggagggagttcaccataactaggtagagtccgtttcttttggacaattcacggcagttgtgcgtctgatggcaggcactagccctgctgtgactggtggctcagactggcaggcttttccgtctccacgtaggaagggcaatgctcccttggttacctacagtgggcttcctcagctaggaggaggtttgagttgtgtggatgcaggctctgttcttcctgaggatggcatgtcctccctcaacagcaggctctggggcgaggagggaggcagggctggcagcgtaggcagcctgtgatctttgcatcccagggggtgatgttgacagcagttatgaggtttctgattcttcctgtttatttcccaaagggcactgggaaggggtagattgtgcggctggatccattcatcgaagtcccatgagaagcaggatctagatccaggccagccttcggcactggccagcaaggagcatggactgttgccagctgcatgtgataaacgacctggacccagccggcctcggacggacgggcggcttctttctcaactaacgtctctccccctgctctggatggtgtacggctttacagaggggctttctttatggttttaccagggtctgctggggacagactcgaggcttacctttgcacatgttaaagaaaataaaaatgaaaaaaaaaaatctaccgcaacagaacaggctgggctagtgtgagctcttggcctggtgggaaggacaagaccatggcgagattctgtgtccaagctgcctctactcgtgacattccaagatgcctctgaggtgggaactgtgaagtaggacagagccccgcagtcccctcttgtccgtcgactcccatttaaattggacataccttgtcgttctgagaaaagccatagataggtgtagctgggatgtagtgatggggaggcccctggccaacagtgggagcaagatcttgagttttgaagacctcagagttctgggcggcctgggaagccatctgcagaacagagttccttgtgggctcctgttttcgctagccctgttctgccctggagcgacagtcagatctccacgcccctttctgttgttctacagtgtccacctttactacgcgtttttttttttttttttcatgatgaccttgtaaataggtcagatgtggaggcaggtctcttctggctccatccaccacacccagaaagaatgggctgctctgcccttctcagccttgctaaccagcagacaccgaggagagcagcggggcaccttagagagcaatctaaacatggttggcaggtggggagggtaaagagtcccacttcctttgtgttagaaggcagactaccctgcgtccttttctcccattggctgaagtaaccagaaagacaagagatccttaacaagcccttcttcccacttgtaaaagggatagcctatctcagttcccaaggatctggattagatagatattcaaaagaggcaagcagcgaatggaggcagctcccagctctgttcccgacgcatgatggtactggctgggtttagtaaggtgggtggggctgcacggatcaatccatcaactccgtcttaaggagaatcagaaagaggagataaaatgggggaatggggcagaacaaagaatttgtcctttcccgcttctgtctagggtctgctaatgctggcttgacgaggggtcagccacttctttcctgttgtgcagttggcttgccaagcaggctccagtaggcccttgcctgcactctctaccatgtgaccatgagcactgctctagggacacctcccatcccttcctagcaccccaaatgccccttcccatctctccttccagaagttggaaatcaagtcaactggataacgcttgtgtgaggacacttgagcagaacggatacaacaatttacaagtctcttcatatctatgtattctatattaaaagtgataaagtcatgtttccggggcgtattcaagtagctgacaagtaattatttaataatagtacatgagcgcattgtaattatcctcgccatagtcaggtaatagcatccaatgggaggtccctaccaacctgctgtatccaaagttttgtaaaaagttgtagaagttgttgatctttttgattttatattcaaaaagtctctttttataaatattatttattatacaatgtatatacctttgagttaactaagattatatattatataaatatatatatatttggagaaaatctatttcatcatgcagtttttttctgttaaatcattaaagagaaggtaaacttcaaacggacacattgtacgatgtgtggagtctccagattcgtccttaggtcaagggtatctgaatgttgtgctaattaaatggccaaatttacggtcatttcctctgctctctaagcaagatgaggtatgatggacagcagatgtgacatgagccttaaagcattacttgatattaagtcagtatcaaacaaggaattgccaacttggggaagaacaaacctggtcagcaattcattcatagacttgaaaaatttcaacaacgcatgttgatgtctcagatctttctacaaggttcagcccaggtcagtgggtcacagggcctgccatagtcttactccctttctcactacatacccaactccagttgtgggagaaataggaattgctcaactgtaaacaaagctggaccagaaacagataacagctgaactgtggaagaggttggtaggtaggttgaccagatggtgttctgcctgtgctctgggccaagtgacaatggaattgtaggttggtttagataggttgctgggcagagctctgggaagggcactctctccttgggctggagtttcagtgactcacccgaagcctttgcctgtcatcttgatgctgtgcagttttaggatgatgggtggtccttcagttctcagacctacctctaaaatatcctcttcagtgttcctttcttctggtctaccactattagagataacgtattcacactggccataggaacatgaagcagtctgcttctgacggtggggactgccaacaccttctggccctcggttgaccatgaccgcctgagcttccatttggtgcatcttttgcccctagaaatctttttccacctatgtgaggccccttgagggtaaaagcagagctcctggcttcagtgctggccatctttgactgcatttcccttgagctgaatactcttttttttttctcgcagcactctgggttttattttattttatttatttttttgactgtataaggttgccaagtatttagatggtccctatcatacttaccaaggccatttgtctcccatgatcattgtattccattaaagagagtacaatttatagctatgctagaacactagctggaaacactggaaagaacaagtttcaagttgtgcctaagtcgtgtgtgcaccttttaatttcagcatctgggaggcagagacaggtagatccctctgttcttggcagccagtgctacacaccagacttagtgggtcttaaaaaaaaggttttgagaataatttgagagaagataaagggatatggtgaggttttttttttttattgaaagcaacactattctgaaggcaggctgtgggtaaatggatgggcacagagataggaaaaggaatcgaggagaaagacagcaagggaaacgaggcgaggctgttttgggtggagtgctggtcgacctgtgtagtgctgggcataacagcacgtaacatgggtggtgtgggtctacattaggaagtgagttcagcaaaacatatggtgttaagccatgactggcttaacagaacttgggaggcaaacagctatctcatcactaatcaatcaccaaatgttcattatggagactgtgctggagaatcataaatacatgtcattacaatttcttgtttggacatagtctcactttgtagtgctggctatcctggaaccatgcagaataggctggcctcaatctcgtgctgatcccccttcctcgctacctctgggattagaggtgcgcacccttcctcccgatcttgggattcctgcagatcacaggtgttatccgtgctctggcatcacgacacactcacaccccctgggctgtcactggggctcagcctcagcagttgtcagcaaacgagtggctttcatcttgcaataacttctaaaatttaaatgctgcttttgaactcttagcaaaccttgcctggcttcacttatttgaaggcggcaggcggcccagctgccaggcaagcaaactgaagtcctggccttgccttctgtttggccaggtggatatttatagctgaccctgcttcagcaggcctgttgaccaggctttgattattaaatgataactgaatctcctccatgattctgtaacataaggtgggaaatgtaaaggctgctcactgtaatttttaggcaataaaaagacagccttaaaaacacatcttaggctcgatagatgccccagtgttggggaatcgagggcggggaggtgggagtgggtgggtggtggaggaacaccctcatagaagcagggagagggaggatgggatagggggtttctgggagggggaggaaagtggaaaagggctaacatttgaaatgtaaataaagaaaatatccaagaaaaaagaaaaaagtattcaaaatatatacatataaaaaaaaaaccacatcttagattctagctacagttatgcatgtttttggatagtacatgaaaaaaaaatcctcaaaagaagacaaaaatgtagtaaggaaaaaatgagctcttctttggaagatttagtatttcctgacagccggtgtgtgtgtgtgtgtgtgtgtgtgggggggggtcatcagagccctccacactgttcacagggctatgctgtgggctggaggtaggaaggcctttggggatcctcccagaactggaggtgggggcaactgctgtcccccaaattgctggacatgcctcttctctacacagcatccatttctgggcttcctggtgcaaggactggggctgtggcatctagtatctgagagatccagaaggtatgaagaacagcagggtgagctcgggggtctcaggtttgcctgcttcagagaagtcattgtaccgcaaagcagcttccacccagctcctgaacaaccgagctcatggctgcagttcagactttttaaggtaaaataggtatcaaacgtaaatatgaagattctcgtacattagcatatactaatgaacttttgaggggtttgttttgcttttgtttttggagacagggtttctgtgcagctctggttgcctggaattcaccctgtagaccaggttggtcttgaactcacagagactcacttgcctctacctctagagtgcctggattaaaggcatgcgccaccactgcccactgaactttttgttgttgttgttgttgtttgagaagagtctctctgaatgaatggttcccaaccttgctaacgctgtttgcctttaatgccgctcctatcatgatgaccctcaaccacaaccttgcttttgttggtatttcataactgtaatgttgctcctgttgtgaattgtaaggtaaatacctatgctttctgatggtcttaggtataacccgtaagttgagaactactgtcctacagggtcttgggactcactatgtagagcaggctggcttccaactcagagatctgtctcccaagtgctgggattaaaggcatgtgccgtcagcttgcatgcgtatctgtgtgccatgtgagttacagttgtacactgccatgtgaattctgggaattgaactgagtcctctggaagagcggtaagagctcttacccactgagccatctctccagcctccttaatgtttttctaaagagatttaaaaacaaaacaaaaaaaaatctcctatgctgtaacaaagcaaggaggggtttctcttctgtggccacttcgtcatgcagccccattagtgattgatcctgttccatataaaatactggtctatacaatatttcaagtatatttactctttattgcattccttcaatttgcattacacaatataatatctttttcaatataattttggacaaaaacacaagacattaacttcgttgaacaagaaacataaattaattcatgtaggactttgttgggaggagaaaggcagaactgcagacaacagggaccacggtggtggacagggaaccacggtactagccacgggaatcacagtttcacaacacaattcactctttcaaagccacaaaataagccagggatgaaaaccccaaacaaggtatacagacggcaagactaggagatgatttgccttctactgtggggacagtgtcagagtatcacccaggtgcccctgtggcagcaagcctcccgggcggcttctgatggctgtctttgtgtttgaagcagcagcggggagagtggcatgcgccctaagactcatctccacgaatgacgtgacgacctaattgcattccttctaacccactgattaggcaaaccaccctccaaagggctcgctgagttcctcttcgggaagaggtgtgttgagtacgctggaatggatattcgagggctgagggagaggactagggggtggcttgttctgctggagagtagtgttttatttatgtgctgcagacactacagatcacttgagatacaaggaggatgaattgtaagtcatcaggctgaggaaaaggaagacgatggcactaataggcctctaacgtcatcctaaggaactgacccacttagagccggacgctaattagaattgagaggcttgtaaattattttaattttttttctgtttagggatgtacagatttccatatgtatctttcataaggttttaacggcatctaccaagtggcaatgattagcatatctcttaccacagagcaaattaattacactcagagcatatcacagccaccccaggaatgatttgacttccgattagaaaagctctcctgattgcaacttggaaatatctctgaaaatgattgagaacagcatcttagatattcaaagcctagttctttaggaacagacaatgacctaatctgcgggatacacagctgttagcatggggagcgccaagggactcccttggaacctctacctttgctcttggtctcatgtagaagttgaccttcgggcaggtggtagggatcgcggtgtgggcagcgtgcacgggtgtgacatgcctcccacataagcaggaaccatcttagctagcacgggagggaagcccagcagtccagggaacacgagaacatctcaaaagcacgagggagttcactgcactagtcatgcagagcgagtgtgtggagagaggcggacacttcacgtagtccagtgtcttgagtgtgaggagtgacgatcccaggccatctgcaccttggtcgcttcccttggtcactgttgtaaacagtccgttttcaatcaaagtccaggggactactgcaaaagaaaccccaaagcacacactaaactgtaagctctgcaaaaacaaaacaaaacaaaccccaaaacaaaccccaaaacaaacaaacaaaaaaacccaaaaaaacccaaccctattcactaagaaacactcgaggcttcctgttctctctacattttccaccatttgtttgctatttgatgggcactttctaaaagaaaatggtcacattccgggcacttaaaagcaggttccagtgaatcatggaccatcaagttttctctgctctgtgacaaggaagtcttgtgaagcaagccaaggagagcagaccaacacgacagcctgcttccttgcttggtccctcagacccacagcacagcgaggggctagtgcgtgaaaacaaggctatacaggaaggaaggaaaccatcagcgggctcatatgcgctggggaagacttgggacctcgcagatgggtgagcactgcgtgtacttacgcgccttcttctctcatgagggccaagaatttcctcacacggtactcaggatccatctaaaaagcatcggaagaaacaaatcagacgcgcgaagctgccttttctccacaatgtgcttcctccgcaccagggaggcgcgtggtcatgtgcttcctgggtcgttcagaaccatgtcaccattccctagttgttgtttcgaagcataataaagtgggttatgttatttagaagccagtggaacttcccaacacggagaggctactggtcactcacaggcacctcagccaagcaccccctgcacccagtgtgttggtgtgaggaggagaagcacaccagccaggtgtcaccacaacactagatcgtggtcactcacggaggggtccagacatgcctgggtgcattcatggtgctataaatcatgagagtttaaatgctaaaattcatatatcttattgaaggaggaggatagaacctgagaaaccaaactgaggttgattaagtgaccaaaatacagttagaactttttgttttgtttttcgagacagggtttctctgtatagccctggctgtcctggaactcattctgtagaccaggctggcctcgaactcagaaatctacctgtctctgcttcctgagtgctgggattagaggcatgcgccaccactgcctgaccagttatgactttcacatactcactgaactggcattcttagctttagtgcccttctggtgacgctgccacacctaagagagcagagagtgctgttggcctctcctctccgtacacctggcctctggtagcccgagagtcacagactcaagacaaggtggtttgatccgggtgatggttcaagtcaccattactaattatctctcctcgctgtcattctggatccaagttacttcacttcaaagtgtatcatagtcttattggcctgactagggtgtgtggggatctggaaaagaataatcacaaacaaacatctctaattactcactatgaatttgtactgtaagaaacacctcacttttaaagcatgttgcagggcagaagtctgctggcaagagggaactccctgccctccaggagtggctgggctcgcaagggctcagctcgcgcagccgtgggcaagagtgcactcagactcccctccaagcaggctggaaaagcgacagttctgtcccagcaaaacatggaacgtaagtttcaaatgtatcaaagttaaggggtcagactacaaagaactaagaaaaagtgtgaacagctaacaaaagagtcattttttttccccctctatgggactagaattacacatgaatcaattgtcaaagctttttctaaaaaatggaactggctggagctcgctggagtcagtacatgcaggtcttcgcccattaactctatttaatatgtgtgaggagcgacttactgacttgcctgtagctatggaattaagagtcaagagaaaggggaggaaaaaagcaacctagataaatgactttattccctcaggtgacatccagtcagagcacatccttaacaccgagcaagttttaacaaaatcgagtccggcgagcagagcgagtgagcatggcttccattctgctgaactgcatgcctctccactcgggctctgcccctgctcctgaggcagatctaaagagaagtcactcagctgctcggaatccatttgacgtgaaggggttcaaactccaggcctatgaagtgtcagtcgctcaagattaggccgagcgccccactctcactttctacctcacacacataagtattaacttgatcactgcgccgcaggcatcaaagggagaggaggcaggggtggggaggaaaactcgcatagtttctcctatgcaattattttaaaagattgaactgaaactggaaaaagaagggcagagctgacttctgacagatttatcttttttcggggacaaagccaatacacctgtatgtatgcctttaccaggaataagcctgagcagggtgcttagtctatgacaataatttactactcataatggaaactatataaattgacttaaaaacagttgctggaagcttgggaaacttttggtttctgaaaaaccacaaaaatctaattttaaattgagtttatcagagagagagttaagataattctctccatatttcttatttattggcctaagagcttccttcagatgtgaagctggggaaccccaatgtgagcagtgggcgcgcagggctccacagtgacacacctcctcaggtctggggatggctcactcctcattcattcacttctgctcctttcattgtatctagtgaaatttattgagctctctaatacgtgctgagctggtccaggggccagcgacagtgtgtggcagcccaggggtctgaacacacggaactcagtctacacaagtgtattatgtacatgtgtgtgtacacgttcgggcacacagaggcaaggcattccagaaggagagagggaggtgcagtccacacaagaaagttccaaaccaaaatcagtctcatctgcctgtgcctagcagcaggctgggagtcagttagtttgagatttctagggcactgggcatggcggtatgagcctttaatcctagcacttgggaggcagaggcaggatggtctctgagttcgaggccagcctggtctgtataaagagctccaggacagccagggctacacagagacacccgtctggaaaaactaaaataaacattttttaggagttcagtgaggggaaacgcacagtcacagccgatctgcacaagtcggccgcatccacacttccacatctcccagagctcttagccatcagtgctgtcacatgctcaccctgaaggacggagcctcagtagtgagagagatcggggcagactcactgacagactcttctcccatctgcatgagactggggacaccttgcttccctccttcccttccagccccctcttcatcttcattgtcatcctacaacatccagtctcccctcactgaaggtaaagtttaaattatcaccaggattttgcacatctccttttattgctaagtgctgtagatgtaagccctatcctaagctgttcagggtctcactccttttctctgattgttaataaggactatgaaattgactgtacccaggtcacctctctgcagcctccaagatgttgaggagcctagggcaggggtgggagtgtcttttcctccttgttgaatgtcttccatgacggggcagttgtagttttaaattcgctttgaagccctttctgattttgagacctaatgactctctacattaagattagaagtcacgctctgctctgctcatttatttctgaagagaaagaggagaacatgggtactcctgaggcctgggagaggaaagcaggccctcctggtgtgctacagccattcctgtgactcacgcagagacgggatcgccttacctgcagggacatctcaatcaacattagtaacttcttgattcctatccagactttcttccctttgacttgctgagcaattgtggtgcgttccttatctttgaagttgcccaaaagctataannnnnnnnnnnnnnnnnnnnaacattttttaggagttcagtgaggggaaacgcacagtcacagccgatctgcacaagtcggccgcatccacacttccacatctcccagagctcttagccatcagtgctgtcacatgctcaccctgaaggacggagcctcagtagtgagagagatcggggcagactcactgacagactgtggacggggcagttgtagttttaaattcgctttgaagccctttctgattttgagacctaatgactctctacattaagattagaagtcacgctctgctctgctcatttatttctgaagagaaagaggagaacatgggtactcctgaggcctgggagaggaaagcaggccctcctggtgtgctacagccattcctgtgactcacgcagagacgggatcgccttacctgcagggacatctcaatcaacattagtaacttcttgattcctatccagactttcttccctttgacttgctgagcaattgtggtgcgttccttatctttgaagttgcccaaaagctataaaagcaataaacaacaattagacacttttatggtgtgcacaccaacattcacctttaagtgaacagtgggaggagctacctgcctgg

SEQ ID NO: 8 - DNA, 3002 bp, Mus musculus
cctcttcatgatcgccggcaaacttcctcctcggcgctgcttctaatggagccccacctgctcgggctgctactcggcctcctgctcagtggcaccagggtcctcgctggctacccaatttggtggtccctggccctgggccagcagtacacatctctggcctcccagcctctgctctgcggctccatcccaggcctggtccccaagcaactgcgcttctgccgcaattacatcgagatcatgcccagcgtagcagaaggtgtgaagctgggcatccaggagtgccagcatcagttccggggccgccggtggaactgtaccaccatagatgacagcctggccatctttgggcctgtcttggacaaagccacccgtgaatcggccttcgtgcatgccatcgcctcggctggtgtcgccttcgcagtcacacgctcctgcgctgagggaacctccaccatctgcggctgtgactcacatcataaggggccacctggagaaggctggaagtggggcggctgcagcgaggacgccgacttcggggtgctggtgtcccgggaatttgcggatgcgcgggagaacaggccagatgcccgctcagctatgaacaagcacaacaatgaagcaggccgaacgaccatcctggaccacatgcacctaaagtgtaaatgccacgggttgtccggcagctgcgaggtgaagacctgctggtgggcccagcccgacttccgtgccattggcgacttcctcaaggacaagtacgacagtgcctccgagatggtggtggagaaacaccgtgagtcccgaggctgggtggagaccctgcgggctaagtacgcgctcttcaagccacccaccgagagggacctggtctactacgagaactcccccaacttttgtgagcccaacccagagacgggctcctttggtaccagggaccggacttgcaatgtcacctcccacggcatcgatggctgcgatctgctgtgctgtggccggggccacaacacgaggacggagaaacggaaggagaaatgccattgcgtcttccactggtgctgctatgtcagctgccaagagtgtattcgcatctacgatgtgcacacctgcaagtagtgagccagggcactgggaaggggtagattgtgcggctggatccattcatcgaagtcccatgagaagcaggatctagatccaggccagccttcggcactggccagcaaggagcatggactgttgccagctgcatgtgataaacgacctggacccagccggcctcggacggacgggcggcttctttctcaactaacgtctctccccctgctctggatggtgtacggctttacagaggggctttctttatggttttaccagggtctgctggggacagactcgaggcttacctttgcacatgttaaagaaaataaaaatgaaaaaaaaaaatctaccgcaacagaacaggctgggctagtgtgagctcttggcctggtgggaaggacaagaccatggcgagattctgtgtccaagctgcctctactcgtgacattccaagatgcctctgaggtgggaactgtgaagtaggacagagccccgcagtcccctcttgtccgtcgactcccatttaaattggacataccttgtcgttctgagaaaagccatagataggtgtagctgggatgtagtgatggggaggcccctggccaacagtgggagcaagatcttgagttttgaagacctcagagttctgggcggcctgggaagccatctgcagaacagagttccttgtgggctcctgttttcgctagccctgttctgccctggagcgacagtcagatctccacgcccctttctgttgttctacagtgtccacctttactacgcgtttttttttttttttttcatgatgaccttgtaaataggtcagatgtggaggcaggtctcttctggctccatccaccacacccagaaagaatgggctgctctgcccttctcagccttgctaaccagcagacaccgaggagagcagcggggcaccttagagagcaatctaaacatggttggcaggtggggagggtaaagagtcccacttcctttgtgttagaaggcagactaccctgcgtccttttctcccattggctgaagtaaccagaaagacaagagatccttaacaagcccttcttcccacttgtaaaagggatagcctatctcagttcccaaggatctggattagatagatattcaaaagaggcaagcagcgaatggaggcagctcccagctctgttcccgacgcatgatggtactggctgggtttagtaaggtgggtggggctgcacggatcaatccatcaactccgtcttaaggagaatcagaaagaggagataaaatgggggaatggggcagaacaaagaatttgtcctttcccgcttctgtctagggtctgctaatgctggcttgacgaggggtcagccacttctttcctgttgtgcagttggcttgccaagcaggctccagtaggcccttgcctgcactctctaccatgtgaccatgagcactgctctagggacacctcccatcccttcctagcaccccaaatgccccttcccatctctccttccagaagttggaaatcaagtcaactggataacgcttgtgtgaggacacttgagcagaacggatacaacaatttacaagtctcttcatatctatgtattctatattaaaagtgataaagtcatgtttccggggcgtattcaagtagctgacaagtaattatttaataatagtacatgagcgcattgtaattatcctcgccatagtcaggtaatagcatccaatgggaggtccctaccaacctgctgtatccaaagttttgtaaaaagttgtagaagttgttgatctttttgattttatattcaaaaagtctctttttataaatattatttattatacaatgtatatacctttgagttaactaagattatatattatataaatatatatatatt

SEQ ID NO: 9 - protein, 355 aa, Mus musculus
MEPHLLGLLLGLLLSGTRVLAGYPIWWSLALGQQYTSLASQPLLCGSIPGLVPKQLRFCRNYIEIMPSVAEGVKLGIQECQHQFRGRRWNCTTIDDSLAIFGPVLDKATRESAFVHAIASAGVAFAVTRSCAEGTSTICGCDSHHKGPPGEGWKWGGCSEDADFGVLVSREFADARENRPDARSAMNKHNNEAGRTTILDHMHLKCKCHGLSGSCEVKTCWWAQPDFRAIGDFLKDKYDSASEMVVEKHRESRGWVETLRAKYALFKPPTERDLVYYENSPNFCEPNPETGSFGTRDRTCNVTSHGIDGCDLLCCGRGHNTRTEKRKEKCHCVFHWCCYVSCQECIRIYDVHTCK

SEQ ID NO: 10 - DNA, 74407 bp, Homo sapiens
tgcctgccttggcctcccaaagtgctggaaatacaggcatgagccaccgtgcccgacctgggcagaactacattctggatgcatcttaaacctcacctcaaccctacaccctcccttttgttgtttcctttctccccacaagtcatctcagaatgaggctcccagctccaggctccagttgcaacctcacccccacctagacaaaccctcaaatcaagaaaaagaagccctggcagggcgtggtgactcatgcctgtaatcccagcactgtgggaggctgaggtggatggatcgcttgagctcaggagttcaagaccaccctggctgggcaacatgatggaaccccatctctaccaaaaattttaaaaaattagcttgttgtggtggtgtatgcctgtagtcccagctccttgggaagctgaggtgagaggatcattagatcctgggagatggaggtcgcactgagccaaaattgtgctgctgcactccagtctgagtgacagagtgagacgctgtctcaaaaaaagagaaaagaaaaagaaatccaaaggaaaaaaagagagagacagagagaaaggaaaagagaaaagaaaagaaatttctgttggccaggcccggtggctcatacctgtaattccagcactttgggataggccgaggtgggcggatcatgaggtcggcggatcatgaggtcagcggatcgagaccatcctggctaacatggtgaaaccccgtctctactaaaaataaaaaaaaatcagctgggcgtggtggtgggtgcctgtagtcccagctacttgggaggctgaggcaggggaatggtgtgaacctggggcgcggagcttgcagtgagccgagattgcaccactgcactccagcctgggagacagagcaagactctgcctcaaaaaaaaaaaaaagaaagaaatttctgtctcaaaaaaagagaaaagaaaagaaaaagaaatcctaacactcatccatccttaagtaaaagcaactcaccttgtaagtcagtctccacatttaatccaactaccctacactagacatgatgggtgaggaggatacagatagttaggaggcctttggctacaagtaacagcctcaagtgggctaacgaacaaggaaaatgtattatttcatatcacaagaagttccaaagcaggactcctctgaaggcagttagtgtctcagcaatggtgtcagagatgaagtttgtttctctctcttggctctgtcttcctctgccggtcagcttcatcttcaggcagctttcctcatagtcacagaatggctgctgcagctccaggtatcccaacccaaaacaacaatgtccaaaagcagggaaaagatatttcttactgtgtgtcattttaagagccccaaaaactcttcccagaaaccttcttgcacccttcagctgacctccctcaggcacatgtcacccagtttaggccaatccctggcaagcagaatgggtccccgtgattgacttagatcagtcaggatttacctctgagcaaggtaggggaggagtaaagaccagaacaaactgggggcctctgccatcctggaggaagggaccaccagcagtgtgagctacactaaatctaaacagaagcctgtcttccagaagttcaaaaacagcagctgaggctgggcatggtggctcatgcctgtaatcccaacactctgggaagctgaggtgggtggatcatttgaggtcaggagttcaagaccagcctggccaacatggtgaaattctatctctattaaaactacaaaaattatccaggcgtggtagcttgcatctgtagtcccagctaggaggactgaggcagcagaatcatttgaacccaggaggcagaggttgcaggttgcagtgagacaagatcactccagcctgggtgatagagcgagacttcatctcaaaaaaaaaaaaaaaaaaagagcagctgattgccacagagggagggagtggatgctcaccgatcattttacatgtcccaggtgccatttcaaacacagcagctatcactctgctgaataggcaattgtctttttgagacaagtgttattatacccattttgcagttgatgaagcaggtacagagaggttagataatatgctcagtgtcacatagtaagaggcagagctgggattcactggggttgtggtagacctgggctctaacgcaaccactcagagaggatttcccagtcagacatgtgaatccccattcaggccttatctagaagccaagacaaaggtgcataagaggtgggtcctgctgggatgtgggaaatgccaggcagatgtccctgcttagcccaagggccctcccacgtctgtgccagctgtgcctaggcccttgccagtgaggcagctgtgaccccattcccagcccactgggcctccatccatgtgattaggctcccaggactcagggcccatagctggccaccctgaggtcccagcaatgacagctactggccatactggtctgtggagaaggtggttagttggcagagttctggaaggtgcaaaccaggacttcactagaaatttcttcaccatctccaaggatattatcaggcttgttctattctatctccctaatgtgcccccacaaaagtcttccccgcaagacccctgagatggagagaacttccacacctctgttttgtttcgttttgttttgttttcttgagacagtttagctcttgttgccgaggctggagtgcagtggcacggtcttggctcaccgcaacctccgcctcctggattcaagtgattctcctgcctcagcctcccaagtagctgggattacaggcatgcgccaccatgcccagctaattttgtatttttagtagagacagggttttgccacattggccaggctggtttcaaacccctgacctcaggtgatccgcccacctcggcctcccaaagtgctgggattataggcatgagccaccatgcctggcctggttttgttttttaaggaaacatttacgtatttggtcctctgatgaatgactgtccccagcagatggcaagttccttgcaggccaaaacctgggctgcttttgctcatcagtgctcagctgccaaggggcagctgcacacagagttgctccatgaagatgcgttgaagaaatggaccaggtgaaattcacagagcacctactgtgtgcatcaaccggagctgggttataaggaagaaggcagactccttgagggtagtcccattcctcgtggagccttgtccacagcaggcatgcagtcaatgtgtgcgatgagaaatacagacactttccgccctcagagcccaggcggaaggtgggggcccatcgtgactaaggttggagacagaagagaccaaagatggctccaagcccctcctgggttgcaaccagggctccctccccttccctgcctgcttatgtcccatacacaggggagtggaaggaaaactcaggagctctagttccaggtgactgagagaaaccgtggcagccacacacagaggtctggctctaactcctcaggtaggatcacagccatgctaggagctggccttgggttagagccccaaaagccttgggcaggccagccatgtccagggatggggctcagggttatgaggcaatggcagaataaaggggcacagagggaggctgaagagaaagaaagggaaggagaaagaggtgtggcacatggctggagaggcagcacgaggggccaccaagccccagatgcccccatgtggcagtgacttcccaacaggctgcccacccttaatctcatcccactggaggcagcacagggtcctatgaaagggacacaggaaccaagcgacagagcagggtagctggggtgggttggagttgtaggggccagggccactcaagataggggcactgaggaccctgaggggccacagggagcccagacctgagtcagtggcccttctatctgagacctcggccctgcctgctccctctcctctgggcccatcatcaacagtgttttcgaggggctgctaagtgctggatccctcaccactgggggttcagcagtcttgtggagggagtttctttgtggagatttcacagttggagacggacaacatatgcaagaaactgagcagatatgtctgctatgtagtatgtataatcagccgggcatgggggcttacgcctgtaatcccagcactttgggaggccaaggcgggcgtaccacctgaggtcaggagttcaagaccagcctggccaacatggtgaaacactgtctctaccaaaaatacaaaaattagccaggcatggtggcgagcgcctgtaatctcagctacttgggaggctgagacaagagaatcacttgaacccaggaggtggatgctgcagtgagccaagatcacaccactgcatgccagcctgagcgacagagcaagacaccgtctcaaaaaaataataatatgtgtaatcacatattaatcacatcagtgtcagggctatgctggaaaataaagctgaataagaggcctgacaggacagggctagggagtggcaaggggtctggaggggcctctctgaagtggatattttgaagtgggtcttggaaggggacatcagacaacattatcccggataaatccttctggagaaggctcctgggcgcctgaagggggactgcttagcagacactgactggggcaggaagagagacctgagagagaggcttactccttgcctcaagagaagaaggaaacccaatattttgtattcaccatccgcagtctggcattccgtcagcaccattctcatttaacgctgacagctccctacaaggtggaaagtgttatctccactccacaaccgaagccagggactcagagatgacaggcaaccggccagtgcccccaccccaccccattccctcccttctaaaggactttcaccgcaaatcgctttccaaaatgctctggggaggccaggcatggtggcttgcacctgtaatcccagcactttgggagaccaagatgggtgggtcatttgaggtcaggagttcaagaccagcttggctaacatggcgaaaccctgtctctaccaaaaaaacacaaattagctgggtatggtggtgcatgcttgtaatcccagctacttgagcggcggaggcaggagaaccacttgaatatggggaggtggaggttgcagtgagccgagactgcaccactgtactccagcctgggcgacacagtgagactctgtcttaaaaatataggtcaggagttcgagaccagcctggccaacacggtgaaaccctgtctctactaaaaatacaaaaaattagtcaggcgtggtggcgggcacatgtaatcccagctgcttgggaggctgaggcaggagaatcgcttgaacctgggaggcagaggttgcagtgagtcgagaccgcgccattgcactacagcctgggcaacaagaatgaaattccacctttctatatatataatatataatatattatatataaatatatataatatattatatataaatatataatatataatatataaatatatataatataatatatataatatataatatataatatatgtgtttattatataatacatatttattataaatacatatttattataaatacatatttattataaatacatatttattataaatacatatatatataaatacataaaactgaatgccctggggagctagagctaagacaggaggaactactgccacagggagaacctctcaggtgcccacagcggcccctgtgatctcgggatccaggaagaactggtgacatccgcctgccgctggcagcctcccatatgtcagcggaagagggaggcatccgcagggtggatctggcggtgccccagtgcgccctggaccggcatcacctgggcccgctcgccctccgcctgtctggagaggagaggggagcctgaagccatgcaccccttatccccagctaagctccgggattgcgaggtagattaagggcattcactcaggagggcacctgcttaaccaagatcctccgaaatccgggctgctcaccagcaacaattgaggatgccgggcccgcagggagcggagtgggaccaggcgcgaccccttcctcgcctgctgacctcccgccttgctatcagcactgccgccagggggcgcgcccgcgccgctgggctctgagccgacctccgcgtgcacctgcgctcctttgtgtgttagattaacatctggtgcttacctactatgcgcttactcggtgcaggtcaggggcttcctgcatttccaggatgcagcctctatgccagcaaactaggctgggcagtggaaagaaatccgatttactcctgcgcccaccacccacgctagggccttcctgcttccaggctctgctgtccagccttccagtggcctctagggagctcgcctaaaaccgctctgcggttcctacagctcctaggagaaagttaaacgccctcctctccaggtcagaggccttggagccccctatgtgctccctttgcactgttcctccataagccctgtggtgttaggccttcggcccttcgcacttccccacctgcttccccgctgcaacggcttcgcctctccctttacccccccaggttggtccggctcccgactcccgcctggcagccccaagacctgtttcaagcaaaaatgaatggcacagtgcctggatcggagatttcctcctccttccccgcgacagacgggtagccccatgagggcgggcgggggcctggccaccggattctttgtctacacggtgcctccgcagggggtccagtggagcctcactgaatacacagcggcagactctgagccccgggggagtgcacatcaaaaggaacctccgagccagctagagagaggggttgggttgggactggggtccccttcccaggtctaaggtcccacacattcacacacacaacaaaaagtgcttcccacgtgccaccccatgtccccaggtccctggcccttgctgcctcttctgccctcttccaagagaccacccttcctttcagggcgatggcctcctggtccaccggctgatgcctccaccccgccctcccttcctggtcttggagtgaatttaaccctttctccaccaagtgaaaccaccctggggcttggggtacctgttagagagagggtgtttctatctgtgatgtgtggtcaggggcgcccgccctcccctgagagaaaccattcctgcgtttccacccgcggcagcgcaaggggtgcaggaggaaggaaattaaacctgtgttgaaggaaggacacctgggggaaaggaagggactcaggctccccttgtctgaggagctttcaagtggcggaaatccccacacacacctccattcactaggggcctggcagggccgctggtaggttccagtcctctcctctgtcacttcccaggcgcacatggccagctcctagattccacccttcaacccacttgtttcctgcctgatgcacatgacctgcgtctgagttctccaggctgcctggaggaggcattcaggtacacatgacccctcagggaatgatgttcttgcccacagcacccaggatgctggctgggcatatctcagccaacacacactcccaccgacagcctcggatcttttgctcccacctcacagggttggcacctgtggagtcttgaggcccagtaatgaccccaagaagccatcaagtccaggccctgtcgccccaccatactgcatccacagtggtgtctgagtggccagggaaggtagccctccccagctctcagcaccactgtcatggggctctggaactcccgagcccttgggcaggactccagcaggcagctctgatcagaaagccacctgggagccctgtgggtgggacaggactccaggtaggacctagcaggcctccatccaagagggaggtatgtggaaagctctccactgccagagccttggtcctgaggctctgcattcatggcaatggtaaccctctttccaggtgaatcagaaacagggcaccccagaatcagcccagccatgaggagcatctctagggatccccatctctgcagcccccaccaggttcaccactcctggtcaggttcacgatttttcttcgccttgcagctccttggtgctctccgcctcccccctgcccctttcttcctcacaccggtggctcagcctccccccgacagttttcttggtttctgtctcagcgtctctctcatctctgagcccctctctctctctcctcctctcggattctccttttcctccccttccttcctctctttcaacctcccctcccaccccctccagtccagcaatgggctgggaacgcagcaggagccatgacaagcccaggcggctctcccgacccttggtgcccccgaggccatttccccgcgctccctgtgccggcagcagccgcgtgcggagagggctcgccgaccagaaggggcagcaggttggagctgtgggtacggggggctcagatcaaaggccaggaatgtctggccccctggcgtaagacttccttcagccatggccctcacctcgtggaacgcccgccgttccaggcctctgtgggactcgggtcggctcattctctgccctttctgccacagttccctacacagcggtccctgctccccaccggcagtgcttccttcaccccagaccggggctgcgcagagtcctggtgcctcaggtggcctgggagggggcctagggaaaggcacccaggtgaccgggcgtgagtccccaaaacctgaccatgatgtcaataccacccagggctgagacctaattcctcgctctggagagggagaggagaggaagcaagcccgaagggggcctggaaggactcctttcctgtggggaggggtgggtaactggaggcatttggtgtccgcacagggcaagggcctttatcgccaaaccccaggctggagctccctatcagtagaaccggggcctcaggcgggacggtcgggcagtgaggggcgctccggagggcagcaaggtcttccaaggacctgggccgccctcggccagagctgcgcgtttcaccggtccctgatggtccaaccgagaatcccactgaggctgtgggtcacgcctccgacccgggccagaggtcgggcctgaacccctcaaggaggagaaagtgacccgactccgagagcaggaaatgcgactggccgctggtgtcagttgcaggaaatgcaaaggcagcaggaggtcccgataccgatctgatccctgacaaaagactcaaatgacactcggctccgtcccccggcgccgcccgcagccagaccttcgagcctccgcggacttttccgcacgttcctcggacacccgggaagtgacctcccgcggccaggacgagaggccagagagcgggcggactcgggaggctggaagctgggagggggtgcgttcccccaccctctgatcctgacctgcccgagcggggcttctggaaacatccctgtgctttctaccctcgattcctcgcgggcccacgtcccaacgggtcacggtccccgccagcaaaggagccacccgttcatgcccacgccaagccctcgccatgtgaacgcccgggtcaaagcccccgcgccctaaccctggccagcgggggaccgcggcggtagcagagggtccggcccaccgcgtccccccgaagccccgcggcgtccggggcgcgggctttgcccaagtttgctgggcgatgcccttcccggagcccgagttgtgggccgggcgggaggggcgcgtgattgacaggctgaactacagactcatctcttaccttaggccgcgggcgctgattggctgctcgctgacatcctcaaacccggctgctccgcgctgggctcgggaggggggcggctgcgggtggaggtgcgcttctgacaagcccgaaagtcatttccaatctcaagtggactttgttccaactattgggggcgtcgctccccctcttcatggtcgcgggcaaacttcctcctcggcgcctcttctaatggagccccacctgctcgggctgctcctcggcctcctgctcggtggcaccagggtcctcgctggctacccaatttggtggtaagactcgcctcttgtctgcccgcggcccggtttctccgccgcgtccggggaaggtgggggcgccggctgggggtgggccgctgcagggctggggctcctctcctcgcctccctccagccccccacccgcccacccctcctggattttctgctggtgtcgccttcagaatccaactcctggctcctctgataatcaccattttccctgctccccgctgcaggggctggaggacttttcccatctcagaaggtttcttattcttagatcctaaccctctgcccgtcccaatctagaggcccccgaagaccccccatttgcttgcagttgggtttctggaaatccagcactgtccctggggcccagccactcctcttctccattttggggtcttcatgggcaaaaccatcctgttccttcactgccaccccacctctgccggcgcctccatcaagagattccccataataacccccctttgccttcctatttcagaccccaaaggcttcagggctcctcccggggcaggggagtgggtggggggatttcatcagattctccccaccgctctagattcatcttgagcctctgaagtgaatatggtatttgctgatccgggatgccattgaattcggattttattcatttcttgcttgtccaccctggcaaaaggggggttccttgaaaatgtgttgtctgggaggggtaggcttgttgttctttgaccaaaaatccaattctccatgtcacatttcttccttttggaaaaccgaggaccgaggagaaagggagagggaagggagaattccgtccctgagaaatgtggatacaaaagacattttagtaaataagactgggaagccgggagcagtgcttggggggggctgtgcgtgtctggggggcctgggtgaggaataaacatcgctttgggagccccagctccaggagtccccttgttttccgagcggccccatcgccgctctcccaccctccgcaggtcccaggggccagaggggaagacactgaaaccagttctctaaattacactccgcctctccccagtctccagccccctacattccggaaaactttaattaaagaatcttcccctcctggacataggagagccttggcctgggcggggggaggtgaggaggaagaatttgggatctgtgagtgagaagtgggctgtggcccccggggtgaaagtcagaaagaagtgccaccacggtgcggtaccgcctgcaggtccccagactccctgcctttcgccaacccagagtccagggtaggaggagcagagacagcgagacttgggggccacaccccgagtcttccagttgtttggggatggcagcatttgtgtctgggtgtttggggctcctgggagagagggtggggacatggccaagggtctctgtttagagggtgctaggagttgctcccaggacagccagccaaggggaagtctttcttctgcccaacccacacttttccggggggctgggctaacctgaggcttccagcacataaagaagtccatggggtggccagggcagccagggacttcaggaaggaggttcggccagtctggggaaaggctgctgccaacaccagtccagcctcacccggccattcctgaccctcttcccattcccgggccaaggccatgccgtttttcgccttgctttcgcagagactctggtgggttgggggagggtaggaaggaaaggtttggcggcccataggtggcagggactgaggaagagagaccagtctctccggccctatgaactagaagagggcactcttccagttggtgtagattctggtgtgaaatggtatcttggggaccatctagatagggattgcccaataggaagaaacgctggggaaacctggaaggtcaagacattggccctaacataatgctagacacatggcttgtttgggaatttggtgggggacaggaatgctgctttgtctaagccaaggagagatgtgtgtgtgtgtgtgtgtgtgtgtgtgtgtgtgtgtgtgtgtgcgtgtgttctgggtctatgaccctaagaggtgttttctatacaccagtgtgtctctgtgtgcaaaagtgtttgtgcctgcaactgggctactatggatgtgaaatcgtgtgggcgtgttgggggatccatgcccacgacaggttgtgctgtgtgtgtctgcacacgagtgtgagcaagtggctggtgctgtgatgtgtgtatgtacatgtgtaagagacagagagaagtctagaagtatctttgcccatgtaaaggtcagagcctgtgtctgcctgtgacgctgggcttgactgtgttcatgactgggcatgtgagtgtgtgtgtgcgtgcgtgcgtgtgtgtgagtgtgtgtgtgcgtgcgtgtgtgtgtgtgtgtgtgtacgtgcgcgcgcatgccttcatgacagtgtggggaaagccccacagatgtctttgtgcatgaatatcagtgctcatggccatgacctgattgtgcttgtaaggaggagagtgagcctcaagtccatagctgtgtgagggctgtgtctgagtccgcctgtgatcctgtccccaggtgctgggcccagggctgtgtggctgtgaatatctttgcagacatctacctgtgggtatgaatgacacctgagcttgggtgtttggtgggcagccatgggcctggagggaaggtccaacaggaagcaaaagtctcacaaggtggctgcagggggcacagctggccagggatggcaagctagagaggcaggggcacaggcttccttgacaccagcttgtcctgtctgtccaggcactagagtcactggcccttctctctgaggttgtttttctttggtcttggagctggggtggagggtgagtcaccttctcagggttagggctggggctgtagggtagatgggcctctgattcctgatcccatttctgcccccactccccaacccagccccccgcctggcagtcagattccagtactttgagcatctaagcccatcttggcctgccctctttggcccacccagctcatgcattccccaggaaggatttacaggggaagtcatgtagctgggatttctgtccacgcggaccctcaagcatgacaccctgagtccacactgctcagaccccagtcctgacagaaggttgaccagaagggacagctctaaggggcctcagactgacacccctggaaggaagagatgttctccaggtagtgacagagccgggacaggaaacaacagcactgatttctcgaattccccttgtcagtcccagttagctcctggtggagaaacttgtctttcttcttcttcttgggggcgctggggtggggggatgaacctatgttattagggcctagcccagcacctgctacattccagcgatggacgtgcagatggagggggcctgctggagatcaggagctcaccctgccgctgtgtgactgaggaccagtggccacccatctgggtctgcttccttacacttcacccaggagtccccagcctgccctgcctcacagcttgggtgaaaatgttttgcagaggacaagggcagtgagctgggaaatagcacacctgagttctcgccatcccaggacccatcctcccactcgagcacctgcctaagacctacctcagtttccccatctgtcagatgtcctgctgcctctcccacccactcccacctccacccacctttcagaggcttgtgaacatgttcagtcaaaccccgtgggggtcagtgggctgggcccagggaggcacctggagactgcgggggaggaaggccccaggccaggtgttaacacttgtaacaggcaggaattacagctcgctggggctgggctggctggggctggtgaggagctgagctagctggaggctgttgatcccacagacagacagacagacagacagatgggcagataccagatcggatggccaggctttaaccgggtggtctcccttccagggcagacctttccctgggggggatatggcggggaaattagtccaggtctcttggaagttaacagccctcccgctcaccccgcccccattatgggtggggcttcggagtccagagggagcaaaattggtggccgatctgttggtattcttccgataggatcacattttgcttaaaaagaagaaaacaggtcaaacgttataataataccaagagcctgagctgagttatgtccttagaagaacctgctgtaatatgtatgtggatggcatgggggaaggggacgctctcagggaaagttctagactctcagagcattttgtcaacagctccggggccaagaggtgagagatgggtggagtctgagtatcacccccacctccaccccagggatcctgagggcttgggtctgtgatgtctgccctgcaattaatcctggcctggtgggaagacctttggcgatgaggtcaaaagaggcaggagctggactttggtgccaagtcctttaggaggtgcttgctgcagcttcaccagtggcaaacccagccaggccctaccagggcccacactctggcatctggatacatgctcagtcactgacaaaggtggagaaactgaggcagacagcgagggctctgggtggaaatctccaaagaatgcactcagcctagcaagcatctctcatcctcctcactacagaacttaatgctaataaacattaatggtacttgggcagatgtagaattggaagaagtctctccttggtctgggcaggagacaaggagccaggggataaggagccaggggatggcacaggaaaggtgacttatcacagaggaggatgcagctaacaaacccttccagggaaaaggaagtgggaaaaaggaagatttttctggtctcagaatgtgatgagccaggagttgagcagaaccttttccacctaccctgatgtgagccacagaaaccttctccagctgccaaggagggcaagacatcctccacccctcattcctaactcagggaggaggtatgcctagccccacccccaccccccgccaaaggttagagccatcctgatattacatctgtacatccatgttatcttgtatgctggaaaatggtgagagtggggagatggagagacctatgtctgaattccaagtttaataccaatggaccctgtgacctaggatgagtcccttcccttctctgggcttcattcaagtccctgcctccttctgggcttcattttccttaaccacatggaggggtcccttttgcctctcagagtcccagggctatgacaggttctgggctcgttgctgtgaagcatgacactctactgcacacattccgggcctgtattagacagtccacccgtttctttctgtggctccatctgacctaaatcgcaaagagctggctgccccactcctgccaagccaacctgcttgcacttccaaacctcgccccaaacactcccactcttctggagccaggccatctgcattcacatctggctttttcatgtactacctgggtaactagggcaagttaacctctgcaagcctcagtttcctcatctgtaaaatgagtgtaatgattgcctctatttcatagggttttgaaaatgattgagtgaatacttcttagaatgataccttgcatacaggaagcatatcgatgttagctattttcacctcctatctgcaagctattggctcactgaagccctggagccaaacttgcctcttccaagaagccctcccagatttgccccacctggctctgttttccccttttcttctttttgcctgtttgccccacagtgctttagctttattcttaagttgagggtgctgggccaggctaatctcacttcagctctttacctgctcaggaaggggagggcagggtagagaaggttgctggagtgtcccctaatcattccccgacccccagagtctgccagactcttgctgggacctagagccagggggctgggcacagaaggggtgggggaggcaggcttcccagggggagtggcaccagggccgcccagagcagcctgagcagaagttgcttctctaggagctgagagatgattcagaaggtgatttatagtcggaaggcagaaagcttggctcctggcagaagctgctgcttaattacattcttggggcgggggtaggggggtggaggtatgtgtggggaggcagcaggggccagacttctgcctcctccccatccaggccctccctgtccctttggctgtcccggctctaagcagggtccttctttatcccgctgccagagagggaattccctgctctcagtgagaggctaggccaggattgcaggaatagcttctgggagtggagaaggtgggaaaagaggaaggaagctggatcccatctcccgggacttctccaagggagactggatggcgacgggctggaaaacgggccttctgggaaggagcactgggtctcctccctgcttctgggcagcggaatagctaaggcacctgggcagagttgagtttctttctttctttctttttttcttgaaacagagccttgctctgtcgcccaggctggagtgcagtggcacaatcttggctcactgcaacttctgcctcccgagttcaagcaattctcctgcctcagcctcccgagtagctgggattacaggtgcgcaccaggatgcctggctaatatttgaattttttagtagagatgggggtttcaccatgttggccaggctggtctcgaactcccgacctcaggtaatccacccgcctcggcctcccaaagtgctgggattataggcgtgagccaccgcacccagccagagtttctagaatcttctgagaggcaactccacgctctccttcgggcaccctgtcctgctgctgcctgggagggcctgcctgcaggtttgctccttttctgttgctcaggtctcagtgggccatgggggctggagagaaggtcctgcgctcagaggctgaaacccggttcttcagcgttaggcagcctgtccctcgtgagcacagtggctaccccaggtgcacaacggttctgccagcaggcacggccccataccctcatgtcaaactaatatctcagagagtcaccccaatgccgctgggtgcagctacaatcacttccgcgccattgacaggagcccccattctgtttccatacctgctgagttgacatcagcatttcccatattaacactgacccatgcaacaacccgcccgatgacacctaaggccgcttagttccctgcatcgcagccgtgaatcccaaatccctcactgctagttcttaaggctggaaaggtgtagggcgggcaggggtagagttgctgaagccagtagtgtcgatttatctgtttgcagcctggcctgtacagccgggaggagttggcaggggtcaggatggggacactagacagctctctggttccccctgaggcgggccttctcaaaatggcctcattatgtgtgtggagtgaattccagaaatgtcaggcacacccatacatctagggaatgaaggagatgccagagcgggctctggggcgagaggggccagtgtgaggaggtgggcggcttccgggcagggagttagggcacctgagacctggctctgccaccatcttgatattaggcaacttcctgaactgttctgagtctcagtaactaggagagttggataagctgctggccaaagacttccagctccgagattgcagtcatggaggctgtattccgcgttcaggtcacccagctatttggaccatctgtgcctggtggagggggtggtcactgaaagctggtctcagggaagggtggggggtgcagagctctaaactctacacacaaagagctgtgagacagtggatgagtctcctccctccctcagttttctcatctgcaaattggatgatgataataacacgaccacctgccctgcctgcttgcagggccgtgaagagcttcaggtggaataatctttgtgggcatgccccgtgaccagttggcctcagacctgaggcctctgtgccctctgccaggggctctccattgagcatcaggacccctacaggaaggagctgaggactccttcctgaggacacttgggaagtgtcaggttctttccagagaagttaactatcactgtgagtcctagaaaagaggaataagaaggctgggcatggggcttacgcctgtaatcccagcactttgggaggccgaggcgggtggatcacctgaggtcaggagtttgaggcctgcttggccaacatggtgaaaccctgtctctactaaaaatacaaaaaattagctgggcgtggtggtgggagcctgtaatcccagctactcggaaggctgaggcaggagaatcgcttgaacctgggaggcggaggttgcagtgagccgagattgcaccactgccttccagcctgggcaacaagaccaacactctgtctcaaaaaaaaaaaaaaaaaaaagaaagaaagaaaagaggagaggaataagagctagtccctgctcagacagtgctaagaatggacctaagagcccccctgagcctctgagcttgaggagttgatatttccagcagaggaagaagtggggctggacaggggagtcctcagctccttcctgtaggggtcctgatgctcactggagagcccctgggagagggcacagaggcctcaggtctgaagccaactggtcacggggcatacccaggttcacagctcagggcatggggcttggttatcctcctggcctaatgcaaaaaccactggccagacccagagtgagatttccaaccagggacacatgggaagatgtaggtggaggtgaggggggcgagggcaaagggctgccagctggaaggggctctgctgaggcctgtagtcatcagggaatcctaatggcctgggtaaggcctagcaaactaggagacaggcacaagccattccctccagctcggctggaaaaactgcgaggactgagtgtgtgtacgtgtgtgttggggagggggatgggagcaacaggaccaagcacccaggtctgtctggaagacctttctgggaaacctgcccctgggcacagagtcccacttatctgccagagccagctgggccggcaaggaaaaccaatctcgcagggcccattaggaatgcaaatagggcttgtgctgtgagtgagcaggatcccgcctcctctccagctcccaccaatcatcttcacaaggtggattgctgagggtgccactcccctgctctgacacctcccatggctcccctcttcctatctggtactgaggctccctatgatttcacttctgtccacctgcgcagttgtaactttcacaaaccccctcgatccccccaataacccacttcaactggaatactcacctctttgcttgttcattgaaatacttccacctcctctctctgactttaaaaggcagcccaacctggggcctgttgacctggggtcagtctgctctgcgctgctcagctcggaccccacttggctcaggtcatgtagctaacagccctgaactatggagggtccttagagggtctctcaaggtggatgggcccctcgacctgagcaggctgctgtcccaggagtggagatgagccttttctccacagtgtcaattcccctgggtttctttttctttttttttaatcccagttccacttgtaaacgtttcctatttgtgtactatttccccctccatgttcaccagttcacacgatgcttaagtgtctaagtcattaattttaagattgcaattggcagaagttgtttctctatctaggaacaggttaatacgtttgttgaccatgtgctatgtgctgatccccatgcagacatcatgatttatctgaatctaattcttgccagtttatagatagggagtcccacagtgcagcctgggcatggcatgggaagccctgagcccacaccctgttggacctaaagcctttttccttctaccaccattcaggctcagttgtggacttgttattggggtaaaaatttgcttgttcatattctactttgttccccaaaggatggttttgagacaagtttacacttgaccttccactcaaaggctgatgctttgggcttatagatactatttgtgaacgtctgggaagtctcttatttggggatgtgtcctcttcactggccacctttccacaagccatcaggctgtcctcaagctgggattgcacagttgctgacagcagtggccatgtgaggattttgttgcccctgggatgggtaaggggcgaccttgatcaaatcactgcctcccgggcctcagtttcctcatctgtgaaacagaaagggtagcgtaaatgacctctcagattccttccagcactaagctctttccttctacttagtcctttttgctgctttgcatctggtctccatcatatacgtgctagaaagcagctgggcagaatcttctttcttgccctagtccaattcttgtgttggtatctctgaaacagccaattgttcatttcacttttacaattcgaccttcagctttatttctccccgaggagccagcatgctttctcctttctgataaagcatgcttccctttatgtcctggctatgagaaaactcagaggtccacctgaagccacatccttgcacccgtgtggaccttccctgatcctgctcttccgtttttattttgttattgaatctgatgtgttttccgtcatcagcctcttgagggcagacatgttggagtctttgtacctggcctgggcataatggatcctcaataaagacttgtctttgggatacacatttgctgtcaacctcttcaaatcctttctggaaagaagcaaggcacatgcgaattaaaaagcaaaataaacattgctctgggagggagttggtcctgactggatagttttgagttatgagaattccagtctgcttctgtttcttttttttctgtttatttatttacttagagatggagttttgctcttgttgcccaggctggagtgcagtagcatgatctcggctcactgcaacctccgcctcccgggttcaagcaattctcctgcctcagcctcccaagtacctgggattataggcatgcgccaccacacccagctaattttgtattttcagtagagataggatttcaccatgttggtcaggctggtatcaaactcctgacatcaagtgatccacctgcctcggcctcccaaagtgctgagatgacaggcgtaagccaccaggcccggccttctttctgtttctttactgtcagcttttccccaagtctacaaaggtcttgtcttcagagaagtcgcctcttttttttcctccatgatcttctccactctaaagctgaggttggttcctaatcttcctctagggactgtctctcgttcctggccaatgactatgtccacccctacccctggctcccttcacaactggttcctcccaccctcccttgccttggaagccgacggtgctattgccaccattccacaggtgacggagtgcccaggtagcacccaccctctctccaacagagctgctcccgtccccagcagccatcgtgagggccaagccccactctgcagatggagccccaaggaggagcagaggggagcggcggccagggatctccccattcacccagcaaggtgtcctcacaactctaaccggctctcccctcccctccgcttctgcccttgggcaacacatgtgcaggtcaccccacccagtccctgacttcggaggagagaatgtctagcctcaggctgggtggttctccatcttaactgaagcttccataggggattctggagcctttctctgctaccagtaaggatggagtctgtgacctctgcactgtcctggaagctaaagcagcctcgagaaagcagcctcttcatccccatgttacctgtgagaaaactgaggctcagctgggcgcggtggctcacgcctgtaaccccggcactttgggggacaaaggcaggcagatcacctgaggttgggagtttgaggccagcctgaccaacatggataaaccccaactctactaaaaatacaaaattagccgggcgtggtggcacgtgcctgtaatcccagctactggggaggctgagaaaggagaatcgcttcaaccgagggctgaagttgcggtgagctgagacctggccattgcactccagcctgggcaataaaagcgaaactctgtctcaaaaaaaaaaaaaaaaaaaaggaaaagaaaaagaaaaaagaaaaaaagaaaaccgaggatcacaggacccaaccaggagctgtaaggagctcggaagcaagtgggcggctccagtggcagctagtaattcctcgcttatgatgtcccgggtatcacatacattgaggaaacaaagcacacacattagctcatcctcccgacaaccccaggaggcagagactcttgttatccccattctacagatgagaaactgaggccctgaggcaccattccattgccgaaggctccatggttggtaaaccccagagctctaaacaagagacaaactgcctgaagccaggcccttcagtgacaccacaccacaccacagccaggaagttcctccttagatctgacttcagtctttccttaatccaggcccaggttttcttcctggggatgtgaatatcactgtcaagtttcagtttggtttggtttgagacaggatcttgctctgttgcccaggctggagtgcagtggtacaatcacagcccactgtagcctcaatctcctggggtgaagctatcctcctgccttagattgccaaatcactaagactacaggcaagcaccatatgtggctaatttttttaatttttatttttatttatttttgagacagagttttcactcttgtcacccaggctgcagtgcaattgcaagatcttggctcactgcaacctccacctccccggttcaagcgattctcctgcctcagcctctcacgtagctgggattataggcgcccgccaccacacctggctaatttttgtatttttagtagagatgggatttcaccatgttggccaggctggtctcaaactcctgacctcaggtgacccgcccacctcaacctcccaaaatgctgggattacaggcgtgagccactgtgcccagccttttttctttttttttgtagagatagcatctccctacattactcttgcttgaactggactcaaacaatcctcctgcctcagcctctcaaagtgctgggattccaggggtagggttccagtttgcacttgaggaccagggttcgtctcatccctgaatcttcctgtgtctggagttggttccttccagtgggttcgtggtctcactgacttcaagaatgaagccacgtacctttgcggtgagtgttacaggtcttaaggaccccaagagtgagcaacagcaagagttatcctgaagagcaaaagaacaaagtttccacagcatggaaggcgacccaagggggttggtgctgctggcttgggggtgggggggtgggcggggaggcagcttttattccctcatttgtcccagcccatgtcctgctgattggtccattttacagagtgctgattggtccattttacaaacctctagctagctacagagcactgattggtgcattcttacagagcactgattggtgcattttacaaacctcttgtaagacagaaaagttctccaagtccccagttgacccaggaagtccggctggcctcatctctcattccttctctagaacaattcctcccaggtgacccatcctctactcacctttaactacttgttcttcctcttctgatctcttaccagcttttctacaacttcctgcaagtcctatagccacagaattgcctttaaatcagggaaagagggggcctgccatcagctctctgatttagaggcttccgtctggtgtcttacagcacttcccttccccatagggcagggagtctggaatccagcatgcctgccctcaagaggcttatgacggaaaacacatcagattaaataacaaaataaaaacaggctagttgtggtggcttgcgcctgtagtcccagcactttgggaggccgaggcaggcagatcacttgaggtcaggagttcgaaccagcctggccaacatgctgaaaccccgtctctactaaaaatacaaaaattagccgggtgtggtggcacgcacctgtagtcccagctgctggggaggctgaggcaggagaatcgcttgaacccaggaggtggtggttgcagtgagccaagatcacaccactgcactccagcctgggcaacagagtgagactctgtctcaaaaaataaaaataaataacaaaaacagaagagcaggatcaaggtcaaggagaagacaaatatgcaagtcaaggtcaatgcaggtgcaaggatggagcttgccctgagtttcctcacagccaggacataagggaaaacacgctttacctgaaaggagaaggcatgctgggtcctcagggagaaatgcccgcctacagcctgtgcccaccctcttcagctgcgccatgagaatttaggctcctggagtatctggcccagacagccgtgagcctgcttccgggctctgcaggcctctgcctggggcccattctgccagggcaggccacactgcctgtggccaagggctggtcaagggaaattcatttgcaagggctgtggctggagcttgagggtgtggctggggcctccagcatgggatgcagaagggatgggcaggctgcaggcctggggctagatctcccatgtcaccattgtctagcgtgaactttatcaggtaacctagccctctaggtggcaagtaaggtttttgccaagataggaggatagaatgattgtttaacttttttttttctttcttgagacatagtcttgcactgttgcccaggttggattgcagtgacacgatctcactataacctctgcctcccaggttcaagcgattctcctccctgagccttgcgagtagctgggatcataggtgtgcaccgccacacctggctaagttttgtatttttagtagagacaaggttttgccatgttggcaagggctggtctcaaactcctgagctcaggtgatctgcctgtctgggcctccgaaagtgctgggattacaggtgtgagccgctacgcctggccaagtgattaactttttaatgaaagtacaggaaaagacgtaaactgtctttcctctgctttcaccctgcaataattggtacagaagacttctgtgaccaaatgcgtgcatacaccaagcaagctgtcaattctgcggcagacatcagccagcgtcctctaatccaattcaattctgatgatctccacctggacatagcatctgatcccataggttgaggtcttagttcccaggacagcctcccacttccagtagcaatcccaagccccaggctgctttacatgtgctcctgactgacctgctataaatcagggttcctgtgacttcctccttgggttccattaatttgctagagtggctcgcagaacacaggaacacacgtttactggtttattataaaggatattacaaggatacagatgaagaggtgcatagggcgaggtatgggagaagctgcactgagcttccacgcccttcccaggcacaccaccttccaggaacctccacgtgttccgctatccggaagcacttgaaccctgtccttttgggcttgtatgggggcttcattccataggtatcattgattaaaccattggccactagtgatcaacttaatcttcagccccctctccccttcccaaaggatggggttggggttagggttgggagtccaaccctctaatcttggccgggcacggtggctcacacctgtaatcccagcactttgggaggccgaggcaggtggatcatctgaggtcaggagttcgagaccagcctgaccaacatggtgaaaccccatctctactaaaaatacaaaaaaattagccgagcatggtggcaggtgcctgtaatcccagttactggggaggctgaggcaggagaatcgcttgaacccaggaggcggaggttgcagtgagctgagatcacaacactgcactccagccagggagacagagtcaaactccgtcaaaataaataaataaaagaaaagaaagtccaaccctttaatcctgcctgggtcttttggggtaaccaacctcaatcttgaagctgcctaggggctgccagctcttccgtcagctcattagcatacaaaaagacatcactttggagtttctaaggattttaggagttgtacgctgggaaactaggtcgaagaccaaatatatattttataatatcacaaacatgcgtacaggcgagcacacaacttgtcagtgtacagcttaatgagctggatagaatatcttatgtttaacagtttgtgaacctggcatgaaacttttcaatactgggcacatggtagatgaggcttcgttgagtggtctcaatgctacagccaggccttagggcttggcggggaaacagttccactagggtcgaactggcacagcatcgggaagaaggcttgcctcctctaatgtggctgcatcatctccatccctcccttggcagacccacagtggcactgccctccctcacagctgtggtcacttacctccaagtccctttttgttaaacttggaccatgttttagcctttctcagcctcaacggatcttcttttctgatcagtttagtcagtcttattttaatttaatttaatttaattcaattcaattcaatttgtttttcaagatagagtctcgctctgttgcccagagtggagtgtaatggcgcaatcacagctcactgcagcctccgcctcccaggttcaagctattctcctgccccagcctcccaagttgctgggattacaggcgcctgccaccatgctcggctaatttttctatttttagtagagatggggtttcaccatgttggccaggctggtctccagctcctgacctcaggtgatgtgcccacctcagcctcccaaagtgctgggattacaggcgtgagccaccgtgcccggccactttggtcatttttaaacggtctaattaggagtgcagcagcagcagatatgactgtgttgttgtatactcctcagcctggcccctgccgccctgcacccgctcctctcccaaccccaacatgggtaagcacatgggcctgggtacagcagtcctggactctagatggttctgcctttttatctgggtggacttcacctctccaagccttggttttctctctgcaaaatggggataacgagggctattgtgaggatgaaaggatataacgcatgtgagactagcacagggtcaggtgtgtactcagtgagttagacacacattttgctgacattaatttcatgttacagtctgcgttgttctcgtgcacacctcacttctccgtgcctctgtgctaccccctgccttctcttgggatgactacaaactcctgttcggtcttgaaatcatagttcagccatcacttcctctgcgcagccttccctcagcaccgcggccccagcaaaggcccttctgagcacatctatttcatggactagactgtaagtcacctgtgggcaggaccagttctccatcatctttcaacccataccaccaaacatagcacagggcacacagtggatcctcaaagacaggttgtgggatgaaaggacactgttgagagtcacctgctggtcccagactcttgtctccctgctccagctggattctcattgcctctgtgatgctctgccaggaagaccagctggtacttgttgtgtattttcctgtattctcagatacctcttcatgtgcatctgtcttgtcttcccagtgtaagagtcagcccctgagggcagggattctgctctgtaggcctctgcatcactagcgagcctcacacatcatcctgagtgttgcaggagcacagttaggaattctgttatcaggccaggcatggtggctcacatctgtaatcccagcactttgggaggccgaggtgggcggatcacctgaggtcaggagttctagaccagcctgaccaacacggtgaaaccccgtctctactaaaaatacaaaaattagctgggtgtggtggtgggcagctgtaatgccagctactcgggaggctaaggcaggagaatcacttgaacctgggaggtggaggctgcagtgagccgagatcgcgccactgcactccagcctgggtgacacagtgagactccatctccaataaataaataaataaataggaattctgttagcacttggcccaggaatcagactccttcccaagcaggctgcagttcaggctcagctggtccccactctctgggacagcactcccctcactctgtgatctcccaggaagtccggctctgggcatctaaccttggtgtggggaggcaacatagcactccagaaagagggtaggctctgtgacagaaccacctgtggtgcaaatcccagatgtccacttcatagcttctagaactttgctttgggtggttgcttaaaaatctgagtctcagtctcttcctctgtataatgggaataaaaaatatgatctcaaggtagttgtgaggttgaaatgaaataacagacagaaactggctaggcgcagtggctcatgcctgtaatccctacattttgggaggccaaggcggacagatcatttgaggtcaggagttcgagaccagcctggccaacatggtgaaactctgtctctactaaaaatacaaaaagtagccaggcatggtggcgcacacctgtaatcccagctactcaggaggctgagatgggagaatcgcttgaacctgggaggcggaggttgcagttagctgagatgacaccactgcactccagcctgggcaacagagtgagactccatctcgaaaaaaaaaaaaaaaaagtagaaataatagaaactgagttgaaggtgaatcattaaagatgttctacaggtcatctaatgtagcagggttataaaaatattctctcccaggccaggcttctttagagcagaaagatctgaattccttccaaaacagaaaaggctggcttcagggaatcccacacactttatgttggtttgtcccaaccaataagcctatctgaagaaagaagcgggtggggaggcatgtggcagaagtctgtgacttggtggacaaaaggcaatgcagactctggcatgaccttgcgttctggtatcctgttcagccagagtactcacaaaggcctccagttctcaggaagggaagggtgaattaaatgtggttagctatcagggatttttttttttttttttttttgagacggagtcttgctctgtcaccaggctggagtacagtggtgtgatcttggctcactgtaacctccgcctcacaggctcaagtgattctcctgcctcagcctcctaagtagctgggactacaggcacgcaccaccatgcctggccaatttttgtatttttagtagagatggggtttccccatgttagccaggatggtctcgatctcctgacctcgtgatccacccgccttggcctcccaaagtgctgggattacaggtgtgagccactgcgcccagcctatcagggatttttatgggggttccaaggagtggtctgtgtagatttaatatcaccctagttaatggctgaggcactggctgtgtaagcccttgctaagcacagtgagtgagtgtggctggaagtgcaggaggcctgggtgggatgcaggctgatccagggctggcagtcactgtgtgcatccaacctttaggcgagagagggctgctaaactctgagaaggaattcagggtgaagaagagctgatgtgccaatggtatggctggcacaagcctaagcagataccagctattctcctgcaagctgatcaaaaatatttttattacataatacttgacatatacaagagaacaatcatatatattagacatgatgacagaatgaaaacctgagcctcactatgtccctgaaggaccagaccgtgactaggccgtcgtgtccatctgtgggtcctcctcagcccattccccatctccctctagatgtgaccacatcctgaattttacctatttattccattacttaaaaatactggtttttggctgggcacagtggctcatgcctgtgatcccagcacttcgggaggccgaggcgggaggatcacctgaggtcaggggttcgagaccagcctggccaacatggtgaagccccatctctactaaaaatacaaaaattagctgggtgtgttagcacacgcctgtggtcctagctactcgggaggctgaggcaggagaatcgcttgaatccaggaggcagacgttgcagagagccgggatcacgccactgcactccagcctggagaccctgtctcaaaaaaacaaaaaaccaacaaacaaaaaactggttttcccaggtaataatgcctaaatgaaatgttttattttgcctatttttagcattataaaaatggtgttatactgcatgtggccctctatgttgagctattctctctctgcattgtgtttctaagtttcaaactgttcctggatcttgctgtagttctcacatgctcacagttgcataatagtccatctttagaatatacagtttatctattttgtctcctggccatggatgtgcatctcgctgtgcacagcagggaaaggtgttcatggaggtacctgcctaggcgtggaactttgggttgcaggatgtgtgaatgttgagctttacaagatgatgccaaactgttttccaaagaggttgtgcccatctgtgctgtcatctttgagattgtttttcccatggcccaaggcccttcttcccgcccgaggcaagcccactcctgaggactccactgccttgggccttcaccgtctttctctcaggatcccattccctactggaaaactctttcctttccctcctccacttggccctgaacttcccaggatttttcaaaacccagcctggagctgccgtcttcctgggagtcctctcagcctcacttccactctctcccaggtttttggaacagcttttccagacagctcttgggccagagtaggacatcgcatagtgtgtttcttataacatcagccccacataatcctgttgagaaaggcttctggagtcaaataaacttaagaatcgccacaggcaacttggagcctcttggtgtttattgttctcatttgaatattagcagctcattagcatagttgcagcactgagaggtcctgccagtgtgacccgtttttatttgtttaacttgttttccaaaaatatttaaccttggagcccttttcccattttcccccatttggaaaatgggatcgagaagattctcctgcctatttcagtcagtttggttttgtggtcttattttcctcggtaaccaagctgagagtcctctgacttctgttgtaatcatcccgtgtaaactagttcagtccagaccaccctttctggagggcttgagtggaaggaatgaatgaatgcactcaggaattaatgaatgaagcagtcagccaatcagtcagccatccagctgagccccctctcctatgcagcagccaggaaccagggactgatcaggcaccgctcatcttgcaccaggggacacccgggctgtctggctggtgaatcattctcccgtcttaggtcccctgtagttgcatttttaggatctgtcacccaatgaggctgggagcccctgcggggcaggaaccaagttgcgcttgcctctctgtgtgccccgagtgggacatacagatgggatctctcatccaactccttctgagaggggcaggagaacattgtggttaagtcttcagcctctggagccagaccagatgtgtccctaattacctgggtaatgtgggccaatctctgcctcagtttccccactgagataggggtgatgataacataccttccttacagaattattatggggttaatatgcggcaagcacacaaacagtgcctggcatagaggatgtcactggtctttattagcactatgacaatggcaaccaacatttattgtgcacctactatgtgccagggactgtgataaaagctttatctacatcatttcaattcttcctccccgcagcctctttgaagtgggggatgtttttctcattaggaagttgagtcctcccaaggagacgtggtaatgggtggtagcaataagatcaggattggggtcagccagatcacaaagccctggcctgcaggcgtggagggtgccacctaccacctgcggatgggacagctcctctgtttctttttactgataattaccctgccgacaacctgatcagttcttttttttttaatcctctattcatctcaacaaaatggaaatccatggtactgcaagggttagaatttaacatgtgtgcacacgtgtgtgtgcgtgcatgcatgtgtgtgtgtgtgagagagagagggagagacagagacagagagagacagagagcaagagtgcacaagtgaaggagaaggagttatctgagaagcctgggggttactagcaccttcatgacagaccaaggaagacagagatccccgggtggggctggctttgagactgcacagcggcagaatcgcttgtgagtcagcagtgccgcagaacagcagggtgctccggaactgggcttggtgtcgtcacccactgccccttgcacagggccctgtgtgccgggaaatgtttgcaggctggacacctgtggttgcttttaaccaggcaagtgagctgggttagaggtagccacatgttcctgagggctcgcagctttggatctgagagggttagacagggcgtcaggggctgagggtcactggaggagaatttgctgtcgtccctttgcccacgggccggctggtcttctcagaccccagaggccagctcctctgttcttccccacctcggaggggagccccagaagtcacagggtcagctgtctgctttccacactgcctagggctttattcttgcaccatccccagttctggccacaccaggggagtgagacatggggcgccggtagaggggctgaatgcgctggtgtggggtaggaggtttcggatgcacattccagagggtgtttatgggggagcagacaagcctggggattcattcctggtagggaacaattccctcagcacccgagggtgggaaatgagggccaaaatggtggctcagagggacacaggtgaggtaagcaggtaagaattcccaccaggtgtctcagaaatgtcctgggaagggcctggcatggtggctcacacctgtaatcccagtattttgggaggccgaggcgggcagatcacctgtggtcaggagttcaagaccagcctggccaacatggtgaaaccccgtctctactaaaaatacaaaaattagccaagcatggtggtgggtgcctataattccagctactcggaaggctgaggcacgagaatcacttgaacctgggaggtgcaggttgcagtgagctggaatcgtacctctgcactccagcctgagtgacagagcaagaatctgttaaaaaaaaaaaaaaaaaagaaaaagaaagaaagaaagaaaagaaagtcctgggaagctggtggaaggaggtcgagatcttcctgacctgggaaaggagggaattcccaggcatctatagaccaataggactgtcgaaagtttgactggtatgagaatgggttaaggtgctgaattttagatttttatcctctccacggtggtacagtgtgttctgcaaacaaaggagagccagccttgaagagcccttctcagagctgactatgttctttggctcctcagcccagtgagatggccttagctctgagccctgtgcaatatgcaaactggaccagatgacccccaaggctccttctagctctgacaggtcctgtcgggggatccagcctgcatatagggcctgggcttctttcagccccatagatggtgacccctcttcaccgctagtaagattgaagctcatcagcaggacctcaggccctggcctcctttcttcttggtcccttgggttttggagttttatgtgacatcaatgtcccagaaatgcccatcctcttccttttctctcagggcacagtcccctgaggtcttgtggtttatccacccccacccctgttctatgtcctccttcacttgctctcccccacgcccctcccaccagagagtttataagctggctgtccccttgctaacctcctgctgttccctatgaacatgcctgttagatttcaccgtgtgacactgtcttggttatgtccccgtcgtgcctagttcagtgaagaacacatagcaggtgccgaataaatgcactctgctgggataaactggttatctccagagggtggggtctggacagagtggcaaaatagcgatagcatgggatttggggtccaactccacctccacttcctggccgatggcaatctgtcattggtaaactggagccggcatctctactctcagggctgttgagaggattcatggagaagctgtgtgaggaaatgctttgcaggttggaaggtgctgggaacgtgtgtcatctaccctggcctctctctcaggaactcttgcccacatttgtcagcatctgctgggtgtgttgtcttgggagaggtcttgttaaccctctgccaccttgaattctctggtcccctgaaattctttgtcctgtctcacacacaaatgcctccagccctcaggtcgggggtctcctctcctcctgcaatgccttgggcgtgggtccagccttgtctgagacacagagaaatggacctccagtgcggaagatctgcaccaacattcgaaagaaaaaagactgataggcgggagcccagcatttgaatttacagggatgttaaccccaacagcggccggagcagcagagcaggacctgagcacttccttccctttctccttagccttccatgaacatgctctctataaaccctgtcctggtaaatgtctcccctcattttttttttttttttttttttttttttagacagggtctcactctgttgcccaggctagagtaaaatggctcgatcttggctcactgcagccttgacctcctgggctcaagcaatcctcccaactcagcctctcaagtagctgggactacaggtggtcaccaccatgcccagctaatttttttttttttttaattttagtagaaacaaggtcttgctttctcggctaggctagtcttgaacacctgagctcaagtgctcctcccgcctcggcctttcaaagtgccgggtttacaggtgtgagccacctccctcagccctcactgctttttttgccatctcagtgccaccatttcctagctatgtgactttagacgagtcacttggcctctctgagcccatgtcatcatccgttaaattgggttctttggcaaattaaaggatgtattctatgtaaagtgctttacatggcaactggcacatagtcaggcctcaataaatgttaactattattattaataatggccactggccaggcgtgatggctcacacctgtagtcccagcgctttgggaggcagaggtgggcagatcacgtggtcagtagttcgaggctagcctggtcaacatagtgaaactctgtctctactaaaaatacaaaaattagccaggtgtggtggcatgcacctatagtcccagctactcgggaggctgaggcaggagaatcgcttgaacctgggaggcagaggttgcagtaaaccaacacggcaccattgcactccagcctgggtgacagagcaagactctgtctcaaaaaaataataaaatggccactctgagtgcctcagtgaataggctccttactaccttacttagagcagagttgaggaaattggtgaagttcttcactaccttattagccactctctacccaaataaatgtaccccaccttatcttattcattatgggtaatcacctgtaaaagcgttctttatttcattcacagcctgagtgtccccaaaaaggtgctccatgacgtcatcccccctctggaggacacctcctcccacccatggtgatttgagccttctcttaggccagggtgattcctgggggaaccttaactggggctaatgtgcactgacattttgccttttgtgtcgaacacacatcccatttgcagagatttagaattttttgactttaaatgttcgctatttctatgtatgtgtaagagagagttgttttcttttgttttgttaagagacaggatctcactctgttgcccaggctggagtgcagtggtgcaatcacagcttactacagcctcaaactcctgggctcaagcgatcctcctgcctcagtctccccagtagctgggactacaagtgtgcaccaccacacccagctaatttttctgtgttttgtagagacagcgtctcgctgtgttgcccaggctgatctcaaattcctggcctcaggtgatccccctgcctcgaaattctgaagtgctgtgattataggcatgcgccaccatgccagagagagagattttatcttttctacacaacgtgtgtttcccccagaagaaatgccttcctacttctgtgatgaatgtaagtagaatgcagacagaaattacagaaactccctgtgccccagcacccttaccagggcatgcctggcctggtggagtgacagggtgttgtacacagtgaggggaaggaagggagtgggagaggaggtgaggctctgcagagcagagtggaccatttctggtcagaaaacagtgaggaggccgggcgtggtggctcacgtctgtaatcccagcactttgggaggctgaggcgggcggatcacttgaggtcaggagtttgagaccagcctggccaacatgttgaaaccccgtctctactaaaaatacaaaaaaatttagccaggtatggtggtcctcgtctgtaatcccagttactcaggaggagaatcgcttgaacctggaagacggaggttgcagtgagctgagatcacgccactgcactacagcctgggtgacagggcgagactctgtctcagaaaaaaaaaaaagagtaaggaaagcgaagtcctgggttggggggaaatgtagctgcaggcaagaaccaaggaaggtgtggagcccccaacccagtagggaaaaggcttgctgccttgaacccaaagagtgtgagcatcctgtacctttgcagacagaacttccacctactcacaaacagatacaccccactgcacagctaagaaagctaaggggaaaccaggaagaagggaaaagaaaagaggaaaaccccagaggaaacgaggagtcaggcctgggcagggggttccagatgacgcatgaggctgcaggaggaaaaggtttcttttgaaacacatcttttatcctgtccttttccgatgtacgtgagcgtgtgttttggaacgcacataaaacgcgagcgcagtagctggcctctgatttctgccaaggtggacggaaacggaggggcgtgcccaaatgcttcttcttcatggctgctggatcagggaagttttgcttctgtggccgtgaacatggagatttgctgagaggccaaggagagagatgatgggggagggctacttcgggagaggaagtggacaagaccagaggttggaaaacaggggacgggttgatcctaacaacttggagggactggtactgggaataggaggtggggcccagggggagggcagaggacccaggagccccagctgtggacccagggtggggctgtgggcaggtccccagccctgtctgtgacctagggcagtgcttctcaaccttgagggagggagggaggataccacagaggggagggagcacctagaccacttaaatccctttctctgcagggggcccaggcagccttgtttctaagctcagcagggccacttactatgcagccagggatgagaaccaatggcccaccctgctgagtgctggaatgtgtaatgaagtcctgcgtgggtctgtaatgaacccagattcggctcctaacaggtgctgagtgcatgtttgcaaacccaggcgcctgttgcaaggagaggacagagctaaagcaaggagcctgcggaggaatgggtggcagggactgatgaagttgggggaaggaggtgcagaggaaaatgttgaggctcgctctggactgcctcgcctggggatggagaatggggctgcaagggaggggcagccagcgctttgaacttgggtggggcctccctaaatagagtgggggaagtccaggtgctgggcagggctgtcttcacctgcccatcctcagcgccgtggggggatgaggcgcaaagaagccctcctgggaatgtggtggaaatacccaccttgaaaggtagagagtggaatcgttgccctgagcacctgggtgtggtcgcagcatcccccgtgaggcctcccaacctgcagctgcctcctgcgtgcgcatctgccactgctggctttagggccagggccaggcccagctggaggtccaagctggagccctgggcagtgtccagtgcactgtggcctcaaagtgcccagccatggtttagtactccagctggcaaggccctgggttcaaaccctgctctgaatttgtccagttgcttccccatggtgtcatttggtttgttcctctgtcccttgtgttccctgataacaagaggttacctctcaaagcttggttagatcagattaaacgtctttggccaaagaacatcatagggaaggttggggccttcctgctgcatcatctcataccattctactgtcacacttctggtggaggcttttaatgatccagtttcctggactcctctccagaggctctgatcctgccacgctggtgttggagcctgggtgtctgtatttttcaaaaccaccccaagtgatctgccgtagtgtatagcctgcatccctgaccccagtagccagctggtcagggactgtccttggttttctgaagagcatagaataagagagtggatgggacagtccaggtaggtgccagccctggtggccagtgctatcaggtgtgaggcagggagggtggcctctgggcccccataaagaggagaatgggcttcctcagggcagctccaggttcaggtaagagtccttgcaagaccaggagtgccccacgcactgtgctcccggcgtccagcataaggcctggcccagcgtgaatgtttattgaataaagacacacaccaggctggtggctctctgaggagccctggggagctgctctaagagtgagctcccagccaagcagcacagctttgtgtgttccccactgggctgcttctaagattcaaacaaaggactcccaaactgtggagctagcagctgtgttaaaaggcccagagagccagcagggccatggccatcacctgccctcagctcgccgtggagacagcctgtgggacctgggagagacgaaggaaaggactgggcactcagtggggctgctgagggcagtgaaaggaggcagggaggtcctcgcagggaggtcctcgcagggccactgcacctgctgaagcaggtgctagattctacatggaaacgagtgaaagaatccctcctctcaaaaaactcaccatcaatggagtcggtggacaatgcacttgagtgcattgaaggttacctgtgacggatgtataagagctggggaaatggccagagggaacaatttgaattggagacattaaaaggggatttaaacatgggaccttgagggatgaatagaagtctggagtcagaagcgaacaagagggctgggcaggctatgtcttgtcttttaccagaactggcttgaagggtatagcaatgtggggacccagcaaaatcctggtgtgggaaccagcagacttggctgctcagaacggcagcctaactctgtaaggttctcatttcccaatctgtaaaatgggagactgacttagggtttggaggggtcaggaaggggagaaatgttacaaggttaaaatgaactaaagatgcaaacatggcttaggaaaaatttgaattagaattccacttagtggagtgggaggcaaagaaacagatggccaagctccaggaggaaaagctggccaagctgagctcaacttcaaggcccagctcgaatgtcacctctttgaaggggacttctttgccttctcccacttccttcccctcagcacacctattccttgaagtcccaagtgggacttctcacactctgcaactgactggtcacctgcactgaggtggggtcactgaggagggtggaggctacatcttttttttttttttttttctgaggcagagtctcactctgttgcccaggctggagtgcagtggcacaatctcggctcactgaaacctctgcctcccaggttcaagcgattctcctgtctcagcctccagggtagctgtgattacaggtgcccaccaccacgcctggttaattttttctgtttttagtagagacaggcgtttcgccatgttggccaggctggtctcgaactcctgacttcagttgatctgcctgccttggcctcccaaagtgccgggaatacaggcgtgagccaccgcgcccggccgaggctacatctcatacatcttgggcacatagtatgcaggtactgaatgaggcccagccttcagatgatcaggtctggggcacttcaagaacgatctgcgtgctatgagagagacaagctctggctgggagtcagcaggcctgggctgtgctctctgcactgcctccaaccagtggaggaacagcagggaaggcacatcgcttccctgggccttaatttccccaaggagctgaactaggtgatgtcaaaggtcccgcttagctttgacattttatgacctaacactgtaatagaatcactaacatgcgtggccatttacagaatgctcctaaagcccttccaggacactcctattgttcccccgcccccgccctactccaatagcaagaaaactttcacaggtggagacttttcttcaacaggtctttattggctgggcacgctggctcacacctgtaatcccagcacttggggaggctgaggtgggaggattgcttgggcccaggagttcgaaacccagcctgggcaatatagcaggacttcatctctacaaaaaattttaaaaacttagcagagcatagtggcatgtgcctgtagtctcagctactcaggaggctgaggtggaaggactggttgagccaagtagttcaaggctgcagtaagctgtgattgtgccactgcactgcagcctgtgtgacagagtgagaccctgtctcaaaaaaaaaaaaaagaaaaaagaaaagaaaaatggcctttactgaacatctatctttgtactgatgagcacccccagagacacctgggcccaccagggtttctagaatgttctagaatgttcagcatcccctgagttgccaagactagacatttagggggagctgtatgacaatcacccaaaactgatgggcagaaatgctgtgaccccaagtaggcctctgggccttgatgacatcctcagtaacagagagcacggcacccctttgtgtgtctgaaggcagagggctgggaccctacctgagcacgcacagggcatctgggctttacctgggagtcctgaactgcgcagcaaagtggagaaacggacccagctctcagcatgtgtccttgggagctgctcccctctgtggtcaccaggcagcacttgcccacctgtgggcttggtgcctctcagggagacgctctggggtctgaagagtgaggtccctgccttttacccgtctctggacacccctctgggcctaggcccttccctgtgaatcccctgcctgaaggaagagacccacagccctggggttcctctggggtgccaagtgggggactgtgtttggtcctggggaggatgggctggggctgctgagcaggccaggggtgcaggacccctccatcccccgcttctcctgtcctcctccttcttccacccttgactcctctcacctcttgtcccctcttccctcctgtttccactctctttcctcctccccaggtcccaccagactgctccatgccccggaccacaatttggctgaaggcaacaatccctctctcgcaccctcctccctttttccaggcttatcaacttcactttcctgtgaaatgaaggggtgggggggtgggtaagaaagaaggaaaaagcacttcatgctcacaacacaacaaaaaacaggtttaaacattttacaggtttcaacatttttcaggcggtcttgtcacatcttatcagatcagccagagccgcaggcaggcgctccaggagctgctttggagaacagaagctgcaacattccagcccaggcactgccccgccctccacaccccttccctcccttcccttttctccccaaagaaacatcccacagggctccctgggatggagcacagggcccgcagcctcttccctctgactgaggtatagtctgtggccaaacccttggctttgagcttctgcccgcaccctttccttctccccacggctgcccagaaccatggtcctcccgggctctcaggtggtccctggcagctgagctgtgccacctcctcggaaggcccctcgtggccctgaaagggaaccttcagaagctgcgggcagaagggagttgctaaagtcgtccacagcatgtagaagtggtcatttggccagcagggctagtgagtttccggggctcctggggcctgtcctcgggggctcctgtcggaggggaaggaatagctttttccttggttatcttttctccgtgtgcatgggtttttctcctatggcgtggatcactgcctgggatatccccttccactcagtcacccccagacctcacctttctgttcctgctgcactcacggtgacattagtgacacaatgcagggtgacaggtccaggaagggctggccaaagcccaaaggctcagagttaagccgaggcaacgtgagggacagacccagaacctggatcccaggacaacagggaagagctggctttgtagcttgtaacaggagcatggttagggctgggaggtcccactgtgtggtcagagaggggtccccaagggaaggcagctgtgcactgaaggcttaggatgcatcataagaaaagcaaaaaggggaggccgggcacggtggctcacgcctgtaatcccagcactttgggaggccaaggcgggcagatcacgaggtcaggagatcgagaccatcctggctaacacagtgaaaccccgtctctactaaaaaatacaaaaaaattagccgggcatggtggcgggtgcctgtagtcccagctactcgggaggctgaggcaggagaatggcgtgaacccgggaggtggagcttgcagtgacccgagatcgcgccactgcactccagcctgggcgacagagcgagactccatctcaaaaaaaaaaaaaagaaaagcaaaaaggggaaagcgcagaggaggtaggggcacagtggctccctctgtgtaggtatgttggctgtgcatctcgtggggacctcgtccggaatatggaaaacacaagccagacctgggcgcctgctgccagtgttggctgggcaggggctgaggtttcgggagagcccacctttccagcctcctagtgtgaggttcaggccctgaagctgggctggctgccccttggcccccagccccctccctggtgcctccaccccttggcatatggcatcaatgctcccaccgtgacgctcagtgtcctcccaccgtgtgcccacagccaagatggggcctaaagtataattcaacttttagctccttacaagcatccccagatggatttctagcttccgtccctctcttgggcccagctctgtctctacgtggtgcctggaagtccctctggccccacgcacttcctcgtcttgttcccaaagctgctttgcttcttaccttcccatcttggtggacaccatctccatcttcctggtcatcctggctcaaaactttggccatactttcctccttcctcctgtttctcatgggaccaaacggctaccagtccttattcacagcttcctgtctgttcctgaagccactgtcctgagatgaccagcgggcccatcccctgccacagaccccggtgacccagacacatgggtcttggcccagctgcacaatgagagctgagccctgggaggttgcaatggatccccaggccccagagtctccttagcatccacgtcaaccccgcctcccagccgctttcccagcacccacctcttgtctcattttgcacataactaacaggatgatattccaaagcccagctaaggaaggtgctagtttgtccgaataatgtctggcactcagggcccctttctagctgcttcccctcctctgcttctctgtgtggctcctagaccctggcttggggaggcatgccaccttgcctggggctgtccccctgccacctggctccacctgagggcccctagccatccttctccagctcggtagctgctccacatggagccctccagaggcagtgaggacacacttgcccccgttcctagagatcgctcgccctgaccatgcaccctctggcccagaggttactggggctgaaagttacaagtgccttgggaccatgtctcactcatttaaggcacccacagtgcccagacctagtaggtgctcaagaaatgcttgttggtctgttactgacagcagcctcctgggctgggtgctcctcaggtgtggcttcattaatctccacgttcccagaacctggaaccctgccaggctgagagtcatcactcaattcgtgcgtgttgagtgaataggcagtgaatgactttgtttaccaaggccagactttaacctgctctctgaaggacaggcacttccactgactccacaaatcaccaggccccagtcttgacagctggggctaaatcaagacaggagcccactgggcttagagcccgggcagctgctccttcatggttttatctcaagaccttgggtcccagctcagggcctgcacccactctaccctcacccttcccttcctgtcctagacataggcaagggtgctcccacccctgctggagatgcaggcgagccagagggccccgttgagagaatgaactagccccgttgagagaatgaactagcccctaatggcaaggcccagagacatgtcccacttctttgatgaaaggcaccccctgaggcaccttggcgctctcccacagccacaggacacagccccacctgagtccctttgggctcagaagaaaccccctacccttggccctgcactgaaatgtcaagaaggtccagacctgtgctcagtacccgcagggtgcacatgtgttccaggagggcgaggaacagtggcagctggaatcctgagctaggtttctctggttttgtcacaagctccctgccaagcagccaggtgagcggctccagtccaggcctgtggcctccctcatccacagcagtgattgcctcgtcactatgggtgtagttgggtgcatcagagcccaccaggcccagccccacggtgtgcacacatgcccctgaactggctaggcttcctgtcctgacatctgccaatcctgaacggcttcttgacctaagtggaaaggtagaggcctgagttccaaagccaacgcttggttcctcacttcctgctctttcctcaaacctttcctttcccttctagaagtttccgtggagggtggagcccttctgggcccaggaacaagttgggcctctgtccagtactgcccaggagccagcaggtggagcacctggccctggcctgttgtggggttgacaggagcaccgtggcccccaccacagggagaggaaaatgaccacaggagaggtgatttctgactccttctcctcaccttccctcctcctctccctctcagcagccatgtcagtcattttaagagacactagatcttcagatcagagtcttaagatgccttccctttgaggctggcacagatggttagatttccgcatggagaaaggtaagggcaaagggcctatttctgcaaagaaggcatgacttggggagacttggccctggagagcaccctgagaccggagggaggaggggagcctttccctgggccgcagcccctgggtccaccttctgcagccccacccatgtgaagccaggtgggtcctttttgtgcccagccccagagaagcttctgagaatgtgcattcatcacccccaggttaaaagcctggtgggtaaaagaactgtgagccctgggttctcctcccacctcctgggcagccagctgtgtgaccccggaaaatgacaaacctctctgggcctcaatcttcccgtatagaggaagagggaattagactagacccggggctctggaatttcgtcctgcacaggggctctaggtgcaaagttgaaggctggggatgcaagcaccatccctcctttgatttttttaattttgctatttaaccattttaaagtgtactattcagtggcattaagtacattccaatgctgtgcgaccatcaccaccgtctgttttcatcatcccaaactctgtacttattaagcagtaacttcccactccctcccttccagaacccctggcaacctctgttctactttctgtccctgtgaatttacctagacacctcatgtaagtggaatcatacagtgtttgtccttatgtgtctggctgctgtcgcttagcttcttttcaagtttcttctatgttgtagcttgcatcagaatttcattcctttttttttttttgagacagagtcttactctgttgcctaagctggcgtgtctttacctagaacttcatgtaagtgaaatcatacagtatttgttcttccgtgtctggcttctgtcgcttagcttgttttcaagtttcctctacgttgtagcttgcatcagaagcatcagaatttcattccttttttttttttggttggggggacagagtcttgctctgtcgcccaagctggagtgcagtggcgcaactggctcactgtaacctctgcctctcaggttcaagcaatactcctgtctcagcctcctgagtagctgggactacaggcacgcaccaccaggcccggctaatttttgtattttagtagagatggggtttcaccatgttggccaggctggtctcgaactcctgacctgaggtgatccacccgcctcagcctcccaaaatgctggcattaccgccaccacacccgcttccttcctttttctggctgaatagggtcccactgtatgtatgggccacctgttgtttatccattcatctgctgaggactcttgggttgtctctaccttttggctgctgtgagtagcactgccgtgaacactggtgtacaggtgtctgttggagtccccattttctttcctttttttttgaaacagagtcttgctctgtcacccaggctggagcgcagtggcgccatctcagctcactgcaagctctgcctcccaggttcatgccattctcctgcctcagcctctctgagtagctggggctacaggcgcctgccaccacgcccggctaattttttgtatttttagtagagacggggtttcaccgtggtctcgatctcctgacctcgtgatccgcccgcctcggcctcccaaagtgctgggattacaagcgtgagccaccgcacctgggcggagtccccattttcaattcttttgggcgtataccaggtgtggcattgctggattatagggtgattctatgtttaactttttgagggacagggccctcttttcatatgttctgtatgtaggggagaggagggagattgtgtgtgattccatttgggaggccacctggttgggtgcaggactgcctaccctaatggatcactcaggggagtgggtgctggcagcacagtgggtgtccctggcagcacagtcagacccccatcagcaggggattggccgtcactgggtggacggcagcatctgaggccaacaaccccagtgtcagatcaggcaggacgcactgtacagggtgcctttaggtgtctcaccatatgttaggtgcgtaagtcaatgcagcatccaggctgacctgaattcactgattaaaaatgttctctaaaaatgttctctatggccaggcatggtggcttacgcctgtaatcccagcactttgggaggcagaggtaggtggatcacttggtcgggagttccagaccagcctggccaatattgcgaaaccctgtctctactgaaaatacaaaaattagctgggcatggtgacgcatgcctcttatcccagctacttgagaggccgaggcaggagaatcacttgaactcgggaggcagaggttgcagtgagccaagatcacgctttgtactccagcccgggcaacagagcaagattctgtctcaaaaaaagaaaaaaaaggtcctctctgccttgtgctcaccatgcaggcctcctgcagccctctggccacagcaggcgttatcagggtagaggcacagaactggggtggggatgggagttagataaggccatgcacaaggtttaggtcttgcctatttgtggagggatatttcactccaaggggtcaacaccaaagtttccacaagcagcccgttgtgcagggcacccgcagcccatccgcctggctgcccgtgtgtgtccttggcccagctgggcagtgggtggtcggagtggaggatgagccggcttcaggaggagggtggcagggtcctagggaagggaagggccgggccaggagctgggtataaatagcccctggcccagctgcgaaggcctggcagggtcctccgccctccccctcaccagctgtcagtgccaggcaggtctctatcccccttgggagcctggccatcatctcagatcctaaacgtaggaacttcctgagcggaaccaaggagtcttgtcctgtgtgtaggcggaagctccggatgccgggaggtctggcgagtgaggggcatcaggctcgtcctttggaagagttcttcattcctttcctccagaatcatgaatacctagcatgtgcccggccctttggaagaccgagtgggctggggtgtgtgtgtgtgtgtgtgtgtgtgtgtgtgtgtgtgtgtgtgtgtgtgtgatggggtagggaccggggaataactggagaaaacactaccactacctctcttcttggagactgagactggcatagccagatggaattggaaacaaatcagttcagcactttgggataagaaggtttgaattaggtacaggaaagattcaggcggaggagaggtgacttctgtctggagctcacagaaggctttagaatggtggtgacctaggaatcaggtttcgaaggatggtgtagaatggttgccgggggccgggcagtggagaggtgcttcgagccgagggctcagcatgtgcaaatgtgcagaagtgtgaaacagccccgctggagtcattcagctggctaggcaaatccgtcaaagccacgcacactttggcacaaagaatcgaggagcatgagagtcactgtgccgcctcccgaagtggaacgtgtacttcaataatggggaataggagtggcgagttaaagtaatgtgtctgcgatggtggaatttcagcagtgtgcgggcaggaggctcagggtgggggtggccgggcatgtttggggaagggcagccatcctgcagaaatcaatcccatggccacagcctctttagtctccgacactggcccaggagctaagccccatcgccagaggccttgctaattactcgcaggatgaccccatctgaactgaagcctttgaatggagcatcctgaaaatgtccttttgcctgcactctttgagtgaccttgaaccctcatccagatcacaactgtctttgttctgccacccctgtgaggactgaggtctgatccaggcatcctttccagtgttggataggaaggggctgagatttctgatgtgttctaccaagtcagggatgcaaggatgggagaaatgaggttggtgacaaggcagggaacaaagtgctggggacagctccacacacaccgtaaccatagcaaccaccatctagcaagggctccccacgtgccatgcactggattgtgtcacttattcctcctgtcgtgtctattttaccgataaagaaactgaggtatagaggttaagaaaattgctgagatcagcagctaggaagtggtagagctggatgggaccctggcaccatggctcccaggtccacagttggtgggacctgggcaacaggaaggagacagggtttggtggaaagagggaaaacagctcatcatgactgaggctcaggaattgttctcagaggacatcacactgggagtcagacaaactcagggcttgaattctggctcagccacttccttgcataagtcgcccaactactccatgcctcagtttcctcatctgcaaaatggggataacaatgcccacctcccagagttgttgtgaggattcagtgagattatgtatttgaagtgactggcacagagcaagtgctacataaatagttgtcattagtattgccagtatccgggtaactgtggggacagaaggaaatccctgtggggcagaggagagactgcgtctgcacagcaggaagggctcagtggcaccttcttcctggagatgtctgggaagcactccgacctttgaggccaatcaagccatgcaggcagtgtgccagagctcaggtgctctgctgggctgcgaagacccacctgggaccctgagggaggtaactggtgaaaccaggaagcagggagccccttggagagctgggtgaggagccgccttgccagcatgggccccccgactcctcagtcccccaagccagccggcctggctttctctgtggatatggctgtgtgacctcgcacaagttggtcctctttcacggcctctgctttttctttttccttttttgttttgagacgaagtctcgctctgtcgcccaagctggagtgcagcggcatgatcttggctcacaacaacctccacctcccaggttcaagcgattctcctgcctcagccttctgggtagctgggattacaggcgtgagccacctggcatggtcggcctctgtttttcatctgtataatgggctttgtgctcccttagggctcctcctgtgggttctgctgctggaccagggctcagcctccagtttagcttgagggtgcccaggcctgcagaaggtgtcaagcaagggctgggagagggggaggaaggaggaggcaggaaggcaacgggaggggaaggaggagggcagaggaagggtctccgagtgcctctcactcccgcctcagctctccgctccagtggtcccatatagggctctgggtcccaaacaccagaggaaggagcggggacagcccaggcttcttccctgggtcttgttcctgagctgcccatctaggatggtgcaaggccgagttgtctgcactgaactctccctcagtttcccctccagtgattgcagggctgtgggggcagctggcacagcagggctgggctggagatgctgcttaagagcacgggaggggcagcctgagcccagagggaggctcaacggggacctttgcagcctggcagacagggcagggtacttagctccctggcctcagtttccttatcttggaaatgggacaatggcgatgataatgaagtttttattacagacctgccgtgaggattacataaggtaacagacacaagcactcagaactgtgtccagcacatgataggcccataataaaccacagggattatatgatcactctaacctgcttctaacagggcaggggcagtgctgtgtgcgccgtgtgcccatcagggctctgggctcactgactctacccactcaggcatgtgctcagtatggaggcccagggtgcagatgggccaggcctgaagccaccttcaccccatgaagacccaggcaggcactgcccagcaggcagggtcacatagtgatgacccccatgggctctggagtctgacaccctgggttccaaccagcaattccataggagctctgtggtctggggtgcttcatcaacctgcaaggctaagccatctgtaaaatggggctaataatgaccctactttgtgctggggctattttgaggattaaatgaggcaaacccaaggaaaagcctctgctcagggccaggcaccggggaaatcagtaattagccattaccaccgataaatcagaacttctgggccgggcgtggtggctcgcgcctgtaatcccagcactttgggaggccgaggtgtgtggatcacgaggtcaggagatcgagaccatcctggctaacatggtgaaaccccgtctctactaaaaatacaaaaaattagccgggcgtggtggtgggcacctgtagtcccagctactcgggaggctgaggcaggagaatggtgtgaacccaggaggcggagcttgcagtgagccgagatcacgtcactgcattccagcctgggtgacacagcgagactctgtctcaaaaaaaaaaaaaaaaaaaaaagaacttctggctgctgcttctttctctttagaaaaagctcagtgcttaagacctggaatgcctcacagatgttaccatccaaactcccagatctggctcctcagttcctccacccaaaataaacaaatggaaaaaggagaacctgcctctccccctgacaactgagcctggagacaaccaaggtggatgggtagcatgcccctgcacggtgcccagggagctctgtgccttggagtctccacgaattggccaaggccaacatcaagctcaagtatggaggagggacccgggggaaggcacatggcactctctgacccaccacagaccaaaaagccgtaggcaagctaattcactctctaaacctcagtttcctagtccaggagatagtgatgttcttcatgtttgggaattgatcagaaatgttgtatataaagtgcctggcaagcagtaacagttgccaaatggcagatgtttggctcggccctgtgtccagcccagaagcttttgtgtactaaaaagcacacaaaaaacctcaccctgccccatggggtcttctcccggcccctctttccgaggcttttgcccatcactttttgtgggaaacttgacttaggccaatgctggaccaaagccttggtcagtgctggacacagagggagaggagatgggccccttcttccagctcacactgcccctggtcatagagcagattgcaattgtccttgaaggccactgacactcacggatcattttctcaggttctcccagaaaatgtcatttctgctgttcctgtgctgagggcagggaacggaaaagtcgtaattcctaccttggttttctagtattttaaactcttctgccccacccccataaggtcattctttctgttgttgactataaaacctgagagagttgatgggatattgattacaaagcgaggggcagaggaatggagtgaattgaccagtcacctggtgttgggtgtgggcagtgagatctgagatctcccttctgactctgtgctaaacttgttttgacacaaagccaagctccagtctctcatgagaaaagaggtggagctctagaaacttctaggaaactggaaagatggtcatggaggccctggtagacaaaggacttggtgcaagccagcaattccttggggagatactgggaggctctgggctgggctggcaccatcgcagggaagaggctgagggcattgccaagggtagtgtgtgtgtgtgcgcgcgcgcgcgtgtcccatgagtcactggaagtgtccatgtggccccagtatcctggactgccttggaaattgcccagcctgatctcttcaatgcccatcagggaagctggacccagaacctggaaaggactggatctgggccccaaataccatctttctagtccaaacctcttttcatggctttgcattgcccccaagggcccccacaagcggcttctgcggtcccatccccctgcaagctggatgcagccagagggctgacttgcgtgggtcagagctctgcgctttgaggggcggcatgctcccgaggtcaaaggtagcacattcaggtgccagggcacaggccctctgcctctccacctaccccggagggttcacaaagcggccatggtgcccaggatgggctctgtgctttgtgcccacagtgttactaccctctgtctgcctgcaggtccctggccctgggccagcagtacacatctctgggctcacagcccctgctctgcggctccatcccaggcctggtccccaagcaactgcgcttctgccgcaattacatcgagatcatgcccagcgtggccgagggcgtgaagctgggcatccaggagtgccagcaccagttccggggccgccgctggaactgcaccaccatagatgacagcctggccatctttgggcccgtcctcgacaaaggtactgccttggggctgagggggggggaggggctgggtggggggagggatcaggactgtatgcccttccaccccagtcagggtgcctcttctctgaagccagggtccctctgggagggtgataaatttggttgcatgactgccacaccttcccaggcgctgctgggggctgggccgccttgagatgctccaggatcctgaggtttgagggccgacaccaagaaggccacagacttccttcctggcttttgcacagtgggcgcctcaggctcctgctgtggacatttgtgacatttccccaatgctgtgttaagtgctatgcaaataccgctttggggtgggggtgagagcattgccacccctaggtccctcccatctagaaagtcctcagtaggtgaggaagctgcctggtgctgtggtagcattgcgttgcccccaagagcccctctgggtttctgttcatcctcatgccctgtcagctggatatgcccaggaatcatggtggggctagagggtgcactggcctctgggtaactttccggccgtcttgcagcctgggagtctaactggctgtgcctcaagtggacagggaaccacatgatttgactttgaacctgcaggccctgggagggaggctaagtgggacaactcctcccaagaaggggacttgggggctcatggactgggtggaagatgggcagctctttgtggaacggcagtgtccaggaatttaacgatcctggccgggctggccacagccagagttgctctgccacccaaaccgctgagcctggccctccctcctattagaagctagggaatgaatgagagctgcctatacagccagaaagaaaagggatctgacgttcaggtgaaggggtggggtgctgggtggggttgggggggaagctgacaacccccattttagagtgcagttcccctttaccggtgcctcaggtgctcagggtctgtcccacctacaggcaaagtgctggctattgtcatgggacaggagggtaattagcaaatcaatggatgatgattctgtttacgcttctattgccaaaactaattattccttgttgacataaaagatttggcctcttaattggggccaagtggcggcggtttgcatttcaaactcgttcttgtcggtgtgttggtctcagcgctttccggtgcccctcctcgggccaggtagcgctgaatcaaacaaccctgcgtctagacgcgctccccaaaagcgagtcacctctgatcgctcttcccgtctccggccaagagccaggggaaagcggctctgggagcgctacccattcactccgcgttgaacgttttaagtcaccaccgtaggttctggcacacgccccggtccctagatggcccgaggacaggtttgggttgcggggggaggggcgatgtgtgcccgagagtttgggaatttgctggcggcggcgaggagagcatcccggaagacgccgcgagcgcatacgcgccccggtcggtgcccagagcccggaccttgaacccaggttcgcgcccagctccggccccacgtttgcaccccgcccccggcgagtccccacaccaccgccgcgtgggcggccaagggttaatctctgccccgcgctttgagacccggggcgcagcgggtcgggcagcccggggcgcgcgtcttccgcgagtctgggggcggcggggtcggcggccggaaggggcgaggcgcggcggcggcgcggcgggcccgaggcgcttccccaggcgggggcgggggcaggggcgggggcgggcgccggaggggcctgggcggcctgaaaagcgcccgagcaccgcccccccaccgcgcggccgccgcgccattcacacgccctctggccattcggcgcggcgcggcgcggcgcgggggcggggggcgccgcttcaatggggatttcgcggcccggcgccggggccgggggcgcggcccggccgcgggagccgcccgttgctacgcggtggcggccggcccggcggcccgggcccggcggccgcattatgcgggtaatgcggtgtgacaccgcgcgaacaaaggcggattgagcggcccagcgggccccgccggacggggaaggcacagcggggctgtcagcgccgctcccaggctaatccccgccccgcccccgccgcccccgcgttcccggggctgggaacccagcgcggcccggggcccgggcgccgctgccgccgcgagaggccgcaggccggccggaaacgaggggcgcccgccctgtgaacccgccctcggcccctcttccccgaggcgcccccagggctggggcgtctaggattggggcgagtgagcggcgcggctgggaccccgaggccgggagcacaactggacgcgggacgtcgggcccccttgccgccgtcctcggtcggccctggcagcgcaggcgcggggcgcgggcgggaccagctctgcactcttcgccctcccgtcgttggaagtgggacgggcccctctgtaggtggctcaggagggcgtgggggccgcggagagcggccgcgggagccaagaggggtcccgggcttccttcttgcagcactcggccaacagcccaggaggggaggcgggcgcctggcttctaaataaatttggtcacatttatgaccaattttgccgactaggccggcccggcgtttcacagcctgtgtcaggtggcgagtcacctccggatcccgggtcctgccatgaggagagagatggttgggctgcaggtcttgcaggccttggcctccctaatcgtcaatgtccacatctataaaatgagtaaaactttccatgtgaatgaagcacatgcagagacgatgaccgttgtgaggaggctggagcacacccttgagagtctctcctttccctgcgctggaccctgggacagaaccaggggaactgcccggtgtccctacccttctgggagggagttggccgtgcctgggcgtgagggcaggagaatggggatggggagactgaggcacgggccactgccctcctggtgaggggctctaggagcggagggaagccgtgtccattttacaaaaagggcgactgagaccgagaaaaggagaggggccgtccctatgcatccacgtgcggaaggggtgggcctgggcaggtttaggctgtagattcccaggcctccctccttacagacctggatctcactcaggcgtgggagggctcaggcctgtgcagggtggtctctggactttgggaaggtggagggcagggggtgtgggaccaggacagaagtggctgccttatctctgcagcaacctgccagagctttggtgtcggcgcctgtttctaacaggcactgctttgccctgtggcatttgaggtcctgagctaatcagcagcccagggcctcagtttgctcatcggtgaagtgggaatacccaactgggtctaaaccagccaaagagggtggggaagctgcctccctcttgcctcagggctggtgagctcttcaactcttcctggcctcgttcccctcacgtcctggcctgggaggtggaggcagggcaggcgctcccaggccgggtcctgagtgctgcctccccacgacctccccgcagccacccgcgagtcggccttcgttcacgccatcgcctcggccggcgtggccttcgccgtcacccgctcctgcgccgagggcacctccaccatttgcggctgtgactcgcatcataaggggccgcctggcgaaggctggaagtggggcggctgcagcgaggacgctgacttcggcgtgttagtgtccagggagttcgcggatgcgcgcgagaacaggccggacgcgcgctcggccatgaacaagcacaacaacgaggcgggccgcacggtgagcccggctaccctccccaaacccttcagggagcagccccccgcttcccctccggagctgccctggcccccacctcaccccttccggcagccctgtgggtcgcgggctccttttccccttggccaggcttggcctcctccccaccccacagccacttcgtctgtccaccctccttcctccttgggcagttcctggactccaccccacccgggatgagtcggcctgggagcatggccaccccgtgggatcaggtgccacccaccacccatcctgtgcaccttggcacgcggtgtagggctgtcaagtcctgggaacctggctttgaattcagcctccactcccttactatgcttgtatgatctagggtgagtcacgttaagttcccagcctcagtttccccatgtgttaaatggagataactcctatttcttttttctttttcttttcttttttttttttttttgagacggagtctcgctcagtcgcccaggctggagtgcagtggctggatcttgggtccctgcaacctccgcctcccgagttcaagcaattctccggcctcaacctcccaagtagctgggattacaggcgtccgccaccacaccagctaatttttgtatttttagtagagacggggtttcgccatgttggccaggctggtctcaaactcctgacttcaggtgatcctcccgcctcagcctcccaaggtgctgggattaccaccgcgcctgggcaacaactcgtatttcatgcgctgtgagaagtggacgtgctgtctacccatgcttggggtgtgaagggggagggaaacatggtcactattctttaggtcttgcctcagtccccatcagttctcttcctgtcacagaggagtagagaaggctggagggaagggggtgggcagtggcagagagggaaggcctggatgtgccccctcgtggggtcggtctgttggccagctgccacttctctcccccagactatcctggaccacatgcacctcaaatgcaagtgccacgggctgtcgggcagctgtgaggtgaagacctgctggtgggcgcagcctgacttccgtgccatcggtgacttcctcaaggacaagtatgacagcgcctcggagatggtagtagagaagcaccgtgagtcccgaggctgggtggagaccctccgggccaagtactcgctcttcaagccacccacggagagggacctggtctactacgagaactcccccaacttttgtgagcccaacccagagacgggttcctttggcacaagggaccggacttgcaatgtcacctcccacggcatcgatggctgcgatctgctctgctgtggccggggccacaacacgaggacggagaagcggaaggaaaaatgccactgcatcttccactggtgctgctacgtcagctgccaggagtgtattcgcatctacgacgtgcacacctgcaagtagggcaccaggtagggctccgggaagcaggggggaggctgggagcctgggcgcagggaatggggttgtttgcccatctcgtcttcttgacgacccccttctgtttctaagctatccaagacacacaagttcccacagccaaaataggaagctaggatttttcaagcatccgtgggaatggtccttgggcagagacttggtggattgcacaaagcacagataaaaacccagtgttggccgggcgcggtggctcacgcctgtaatcccagcactttgggaggccgaggtggacggatcacctgaggtcaggagttcgagaccggcctggccaacatggtgaaacccgtctctactaaaactacaaaaattagccgggcgttgtggcaggtgcctgtaatcccagctgcttgggaggctgaggcaggaggattgcttgaacctgggcgacagaggttgcaatgaactgagattgcaccactggactccatccagcctgggcgacagagtgagactccatctcaaacaaacaaacaaacaaacaaaaaaaaacaaaattcagtgtgtgcacattaggtgccagcaattgattaacatttttacacaagttagttatgagccagatcaaatttttgcatagctgctagctgtcattcttgagcattatttggagatggggggctggaagctgggagacctgacgtctggtcctaactttgtcagtaacttcctgttctttcacttttctgggcctcagctttcttactataaagtggtgatggtggtgaagggcagggggcagtttaaatacctcaagcagcgagccaaaatgtctcctctacccctgaggcagagtcagtgtgcatccaccttgaacttagagggcaagttcctgcacaagcataaatcgtaccaacctcagggaggtgggtggggggaagcggcatataagcccatatcctgacagatctgaagcttgggtggagtggggagcactctcaccgagtttatggatgatgacggggagcaggagggattcaagttcagagtggctgggatgagtaatcgagggatcaaaggcgggtggattttgttcccaagcttcccagaggtggcctgcatgggaggcgctatgcactggccctgggttccacagcaccccgggataggtcagcatggatgaggagtggtcctggacccccggggtggaaggttttaaggctggggtgccctttcttccttttctgtcccctgagaaggagcctagtgtgtcgaggcatgagcatgggtgttggaattaggccctgccctgctccagctcctaccacttgccaaccgtgtgacccaagcaagaaattcttcatagacctggttcctcatctgtcatcctccccagagatgctgtgagggacaaatgaaaggacaccgaggacagggcttggttaattgggaagcacttccctgctgggtcattgttgtctggggtgctgctgggcgagagcagcctgtgaaagggtagagtgccccctcttcctgcagttccacagggcacctctgagctactggcacatgtctgtgccatagggagtaggggagggaagtggacgggcctctctgagatatgggaggtacttgacgtcatggagaagagctctggctgaggggcgactcactcagcccatctaggaagcccctcggtgtagctcaagttctgtcctggtggggacagtccagaaaggcagcaggtggcactacctttgtcggtatctgaacaaaagcagtgtggggagtgggagaggacgaaggtgaatccagcgcctccactcgtccactcagctgtctggcctgggagcgccagtttcctcctctgttcagtggtggtgacaatgggagcccagcagaactttttttttttttttgagactgagtctctctttgtcgcccaggctggagtgaagtgcgcaatctcggctcactgtaacctccgccacctgggttcaagcgattctcctgcctcagcctcctgagtagctgggattataggtgcccgccaccacgatcggctaatttttttatttttagtagagacgggtttcgccatgctggccaggctggtcttgaactcctgacctcaagtgatccacccgtcttggcccctcaaagtgctgggattacaggcgtgagccaccgcgcccggccagaatcagtactcttcatcagccctctttctccccatttctgaaatggacaatgagtgttttttttcctcaatcttatgtaaagtgctacatagatatggtttcaagatgctgtgtccaagtggttcctacccggaaccccttctctgtggaagctctggaggcctcactctgtgaccagtggaggacactctcccaacatggtgcccttctgataaacactcccaggccagctcttctgcctcgctgagccctggcttcttcatttgtgaactggggatgagaactgtgttctgtgtagggttgtcctgtggactggagaccctgcacatgaagggcctggcccaggacccagctgctcacagggcagccacagaggctcctgggccaagcagagctgacctcccagagccacctccccaggcgagagccgcctgctctggagcaatgggcccaggctcggccgagactccgctaggcaagacgggagcctgcgggatgcactggcagggatggcaggggacagagtcgttagctgttctcttgtcttccctgacagtcttggcagtgcaggcaggagagagaagggagtcgcagagcaggccccgggccctccacacggtgaggagagagcgcctgtcaaatggcttgtgtccttcctttgtggggaaaacaccttttctgtagctttttgtagcttttacccagtgtctctggctaaccattgatttggtgccttacaagtgccagatttattcctcgtcactctgctgttgtgaacatggtgagctggagctggaaaggttctggcaagagtcgagtggcctggctgcgcccaagtcctggatctgttactgccttgctgagagaccttggatgtgtcccttcaatctggctgagcctgtttctgcctctgtaaagtagtcttatcttggccttgtcagccccctagaagagctgggggttgactgggaatgcctcaaaccctttgtgagatatgactatgcaaatgagtaaaatgaacacactgctgctccaatgggaaggaattgttcgtaattaagtaggctctctcccatttggacagctcattatcaagctatttggtgcggtacaaaaacacagtgcatgcctggcgtgagcccagcacagcagttgacttggagttggggactgggccctcggccaggcaccgtttctcccatcctgagtgacctgctcctgggcttcctgttgcccaaggccctcagctagaggtgggggaggtagaatttcgatcccattctgtggactcgaaagccttactgctcctgtgactcatacgacctccctcaacagcaggcccaaagcacagaggagagcgtggagaaaccacccaagtcctcatcacctctgagcaccagggacacgttcagatccatcagcagcctctgatctttgaaccccaatgggtggtctctgggaatggaattatgtttctaattcttcctcttgattttccccaagggcgctgggaaggggtgaagtgtgtggctgggcggattcagcgaagtctcatgggaagcaggacctagagccgggcacagccctcagcgtcagacagcaaggaactgtcaccagccgcacgcgtggtaaatgacccagacccaactcgcctgtggacggggaggctctccctctctctcatcttacatttctcaccctactctggatggtgtgtggtttttaaagaagggggctttctttttagttctctagggtctgataggaacagacctgaggcttatctttgcacatgttaaagaaaataaaaatgaaaaaaaatttgactccaacagaacaggctgggctaatgtgagctctcagcctggcagtcaagacatcagcatgggcaaggttctgtttccaaactgctgcttctggtgacattccaagacgcctggagggtgggagtcaggaagtaggacacacccctgcagtctccttttcttggtccactcccattcaaatttgagctaatttctcattctgataaaagccataggtttagctaggatgaagtggtaggaaggtccgtggcagttgttagagtaggatttggagtttggaagaactggcagctcagggtggcctggtcagccgtttgaagagcagccatgtgttcttctcagtctcattttctctataaccctgttctgcacgaggggcagtcagatctcaaaatctttttctaccattctgcagtttccaccgtcaatgcagttttttttttgtttttttgttttttttttttttttggtggtagtggaccttgtaaataggctatgtaagggggcaagtcttctctagctcaaatggcttcctaaataaataagcggtatcttcagaaggggccattcagtccttcccagccctgctcacctgcagattctctgtacaaataactccaggtagagcagttggactccaggtcaccttagtataagttagacaaagggtccgtgagggagtagccatcaattcctgaaattccaactttgtgactagcagatggggaggatgaaaaccatccctttgcttcctctccaatacggacccatcttactgtgtcctttcctctctggggccaatgtgagtaaacacagacacagagttctttcccccagctcttcctccctcacctgcatgctgagatagcttccatccatgcagttcccaaggatctggattagaagttcaaaggggaaccagcagtcacctactcccttaggtgaagcatctcacggctgagttctccctgaggcatactggtccagctgagcgtcctagagaaagctagcaaaagggaggcacatggatttcacagtatgaattggttcaacaactgtcttagggagaatcagaaagaagagatgcagcaggggaatgagcagaacaaagatttttctttctcccccttctctctggggtctacctaaccctgacctaaaataccagggcagcgatctcccagctggtgcaggtgggcttgccaagatggtcgtccaggagcccgccttcacttctaaatctgctggccacaagccctgctaaagatacacatctcaccccctccgccaagtctgaaatgcccctccccatctcaccttagactgaaaagttttaaatcatgtcaactggataatacttgctttatgtgagaatacttcagcagaatggatacgaattttcaaaacaatcttttcatatctatgtattctatattaaaagtgataaagtcatgtttctggggcgtattcaagtagctgacaagtaattatttaataatagtacatgagtgcattgtaatgattctcgccgtagtcaggtaatagtatccaaccgaaatttcctaccaacctgctgtatccaaagttttgtaaaaagttgtagaagttgttgatctttttgattttatattcaaaaagtctctttttataaatattatttattatacaatgtatatacctttgagttaactaagattatatattatataaatatatatatatttggagaaaatatatttcatcatgcagtttttttctgttaagtcattaaagagaaggtaaacaaacctaaaatggatacattgtacactgtgtggagtttccagattaatgctcaggaggtcaaggatacgagattctgaacatggtggcctcagctaattaaatgaccaagtgaaggttatttcctctgttttctaagcaagatcatcagagatgtcacggacagtgggtctgatacaccacagtacatttttaaaggcttcttttgttctaagttaacttctaacaatgaatttccagttttagaaaacaacaacttgtgtactaattcatttcacagactcaagtattttcaatgtataaattaatgtcacaggcactcctaaaagatgtggcccaaggccagcagaccgcaggggtggccactgccttaatcccctcctcaccacgttttcaactccatttaatgggaaaataggattttctctattgaaaatgaaacttgactgaaaattgtctgtcccctgctagctccactgtgagagctaagccgtagagggaggtaggctggtctacaagaagaaagcgtgtgccctgggctgtgggctgtctggaacaattgtcatttgaagttgggtttgggtttgggtagaaagggcctgccagtgggcatgctctggggatgggcaccctctcagatcgccacttcacaggacccactggaagctcacaggttatgccttctcaacaatgagatgccacaagttggttttatgacaacagacaatcctttagttttcagacctacccataaaatgtcacctttggtttattcagcacattatttcagagaataacaaaaatgttttttctttttatttctcctgacctacctcatttaggaacaaatcttacctcactacgaagagaaataatgagaacaggctgggtggggtggctcagacctgtaatcccagcactttgggaggccgaggtgggtggatcacttgaggtcaggagttcgagaccagcttggccaacatggtgaaagcccgtttttactaaaaatacaaaaattagcagctgggcatggtggtgcatgcctgtagtcccagctacttgagaggctgaggcaggagaatcacttgaacctgggaggcggaggttgcaatgagctgagatcgcaccactgtactccagcctgggtgacaaggcgagactccatctcaaaaaaaaaaaaaaacaaacaaaaaaaaaccaggaaaataaagccatgagccgcctatggtggaggcgggctgctctgcgctgtattcagacctgtgacctgaggttaggaatagccaccagaagttgatgcactctgttttgtccatgatgtgtctttagcccctgaaaagctgaaaccacaaaaactgttacacttcagccatacaacgaatcggacacgtacaggatacagatctcctctacatcttacagtctggtcatttttatttcatttcgactttttatttttcttttgcataaagctaatgcaggttgactacaccttttctgaaatgcttgggaccagaaatatttcagactttggaagatttgcatatatacaatgaggtatcttggggatgggacccaagtctaaacacgaaattcattgatttcatatgcaccttacacacatagcctgaaggtaattttatgaaatttttaaataattttgtgcatgaaacagtttagactgcattttgaattttgattgccacctgtcacacaaggtcaggtgtggaattttccacttgtggcatcctgtcggtgctgaaaagttttagattttagagcatttcagattttggatttttagattagggatgctcgactgaacttatctatcccagaattctaggtactttttcctttttttttctttttttttttttttttgagatagggtcttcctctgttgcccaggctggagtacagtggtgtgatcatggctcactgcagccttgacctcctgggctcaagtgacctcctacctcaggctcccgtgtagctgggaccataggcatgtgtcaccatgcccagctaattttttaattttttttttttagagatgaggtcttgctatgttgctcaggctggtcttgaactcctagcctcaaatgatctcccacctcagcctctcagcattgggactacaggcatgagccaccctgcctggccagtactttttcaatcaataagattgccaaatatttaaatggtccctattcatactaatgaagaccatttgtaatcgtatgattagtttttaatttttaagagacaagtgtctatgtcactcaggagtacagtggcatgatcatggctcaacacagccttgaccccctgggctcaaatgatcctcctcagcctcccaagtaactaggactcaggcgcactctactatggtaattaaaaataaaatcttttgtagagatggggtcttgctgtgttgcccactggtctcaaactcctgggttcagggggtcctcccacttcagcctcccaaagtgttgggattactgggtgagccatcacaccctgcccagtcttatttgatggttaaggagaatacagttgatagctgtgcttgaacatgtagtttctccttatgtataagtacttacaaacgtctaaacacaagaggacgttgtttaaaaatctgaaagagacgacataattagaagatatctttcaaagcaatattattttatgaagaaagaagggaaggaaagcatgtgagacagttcaaggatgaggggatgaggtacaaagaaaggtggaaggaaagaaggtagggaaaaagaaaagcaaggaaacatgatggcgacatgattcttggtgttacctaatgccgtctcccctggtggccctgggcatagggacatgttcttgtgtgtgtggctggtctgcacactcgagtgaagtcagtgcagctacgcattgctgctacactgccactgtttctcctagtttaatagagaaccttctaggaggcaaaaatttcttaccattaatcttatactcccaaaatagtgagacagaagttgcatggcgtctacgctgggaaaatttcaaacatgatccctccttggatattttgtcttcacccacttgggatgcttgccaatcacaggcgctatctcccgcatctttatgccatggtgcccgtccagcacacacccttgtgggctcgtctccaggacccagtctcagtacggcttgccagctgatgagaaactctatatcattttgcaataaattctgcaacttacctgctttcttgaactctcatacacacccttccccagtcacttattttatttttcgagacaagagttttgctcgttgcccaggctggagtgcagtggtgtgatcttggctcactgcaacctctgcctcccaggttcaagcaattctcctgcctcatcctcccaagtagctgagattacaggcatgtgccaccatgcccggctaattgtgtatttttagtagagacggtgtttcaccacgttggtcaggctggcgtcgaactcctgacctcaggtgattgcccgcctcagcctcccaaagctctgggattacaagtgtgagctactgcgcccggctgcccccagtcacttctttaaagaggctatggaccaagttgtcaggcaaggaaaatgaaatcctgctttcaccttctgtgtttgggctggggtgtttgtttatagctgactcactgtttcaacaagtctgttgatcaggatttgattattgtacacacttcaatctactccatgattttgtgacttgttgctgaaacttttaaaggggaggctgcaatttttaggatatgaaaagacagccttaaagtaaaaacatatttctgactttaaccacaattatgcaatttttctgtgtgacattgaaaaaaagtgtcccagtgaagatgtacaaatttagaaaggataaaataacctcctcttttgaggttttgatctcaaaaacatcttatgacaaaaaaatagccggttaacaattcgcctatagatgaagaaacctaaggcagcagctagctggagcctcctttgcttcttcacaggccgttctgtaatctcatacgctctgctgtacagcactggctttgaagaatatttgggcagcttcaagaacccaccttctcaaggctatgcagggaccaggtcggcctcagggtcctcctcccaggaactcccgttgtggaagttcttgaagctggcctcttccccacagggccttgtggactttctgagctgcctcctgtcctaaactgagccaatgctaaggatcaaggtttaggaggttaagagatctgatagctcagaaaaatgtaaaaaactatggaggatacaaaagtgaaccatgtgaagcaatctcactgagagccttgaagttccttggtttgtacatttcacagaaaggagtaattctaattgagtggcaaccctcctttctggtttattactaaccttgtttgtggcttaggtacctgagttgattttttttttttctttttctgagacaaagtattgctctgttgcccaggctgagtgcaagtggcgtgatcctggctcactgcaacctctgcctcccaggttcaagcaattctcctgcctcagcctcctgagtagctgggattataggcatgtgccaccacacccggctgttttttgcatttttagtagagacagggtttcaccatgttggccaggctggttttgaactactgacctcaagtgatccacccacctcagcctccctctcggattacaggcatgagccaccgtgccaggcattttttttttttagtaagataaaataagtataaagcataaagatggttgtatattaactttttctgatactctaatgatgtttttaaataactatactttctaaataagagatttttaaaataaaaatcatccctcatgttatgctacttgtaacaaaacacggagaggtttctttcctgagccccctccttcttcctccattcctatcagctgttcatgtcgttctatatgaaacactggtctacagaacattttcaagtatatttactctttattgcattccttcatttgcattaaacaatattttttcaatacagttttggacaaaacacaaagacattaagctcatttaacaagagacataagttaacacaatgtgtgctgctttcatgaggaggaaagaggcaagatcttagaggaatccaggatactggccaccaggaatcacaggatctcacaatacaatccacttctttaaaagccacaaaataagctagggaagaaaacccaaaacaaagaagatatgacatccaagtctccaccaaaagtatacaaatggcaagatttggagatgatctgctttctcacatgaggacaaataacagaggagccacacccaagtgccactgtggccacaagcctcatgggtggcgtgtgaggtaagcaccttaggatggcttctaattgcttgtccttgcattttaagcagcagttgggagagagaggcacactccataagtctcatcaccaaatatgacctaattaaattcctgctaagtcagtcagttgtaagacaaatcaccctcaaaaggactcaacgggtgcttccttttggaagaagtgtgtggagggtaaaggaaatgtgttcaatgtattggaatggacaataaaggactgagggagagggctagaaaatgattgatttttctggagaatagtgttttagacactagatagtacagatcatttaaaataaaggataaattctaagtaagtcattaagctaaggaaaaagcagtgatactagtaagccttaatattatactaaggaattgacccacttggagttggacactaattagtgctgagaggtttgtaaattactttaataactcctttctgtttgggggtgtatgctttttccatacctatctttcacatgtttttaacaacatcttctaagtggtaataatgagcatatctcttaccacagagcaaattagttatacttaaggggaagtcacaaccaacacggtagtcatctgactttctattaagaaagatcttctgactgcaacttgaaaacatctctgacaatgattgagaacagcattttagagattcaatgccttgtttcttcaggcaaagagaataccagtcttgtgggagacctttaaccaaatacccagtgacttttagtgttagctcaggacagctgtcagaggatctctggcccacacctcgatttactaagccagatttgcatgtagaaagtctgccttctaatcggccaactgttgtcatgcaacattcatgacactgactgagagttttcaagggtgatggtgctagtagagaggttgaaacgtgtagtgtccacaagtactggatggttcccacccagagggactgagcaagaaggaatcactttagcctgcatgggaaggtaagcgcagcattctaaaccaaattgacaccttccacgagacactaagctatctcagtatgcataaggaagggagttttattgcactaatcatgcagagcgagcacatgttgaaggtagagaacgttccacttagtccagtatcttgagtaagacagtgaagatcctaggccatcttcaccttggtcacttcccttggtcactgtgtgtttcaaatagttcattttcaatcaaaatcaagggggctactgcaaaagaaataccaaaacacaaaaaaacagatgagggtccgtaaaaaactattcatcaaaaaaaaaaaaaaaaaaatcactaaaagcttcttaatggttatcctacatttcccactatgcatttgctattagatgagcacttcacaaaagaaaatggtcacagctccatgcatgtaaaagcaggttccaataaatatgtaccattaagtttttcctgcattgtgacaaggaagttttgcgaagcaggacagggagagcaaaccaacagtacaaccaacttccttgcttggtctctcggacctacaacacagcgaagaattcaaataaatggaaacaaacttatctaggaaagcaactcttagaataggcacagggatttaacagggtggtaagtttggttgatggtcattaaatgttgtatgtacttacgctccttcttctcttaagagggccaagaattttctcacacggtattcaggatccatctaaatacatcagaagaaatgaagatgggttaatggtaccttctaacaactctgcacttgcttcatgagaaggcagtgttcggtttcacacttcatcaatgctctgctaggtcactgaatgtgttacctgctccttgaccagcattctcacacaaaacaaagcagatcacatcatttggaggaagtgaatggggttttccagaactatgtacactgggttccaaaagacccaagcccgctggccatcataggcacttgggccaggcgtgccctgtgctgatgcctgtgaggcatcgctgtgagactggacagggccattcatcagagttcaaatgacaaccaattcacctgttgaaggtgtaaaaggctactaaagtcacagcaaagtagaagataccaagttgaggttaattcaacaactaaaaaatagcttattaactctacataaccaaccatgtagcttttcttagcctcagtatccgtcatatagtttcttctttgtagtaacaaagttgtgctaaaactaaaaaaatgaagagtactgctgattcctgaaatcatctccagatgaatctgggtctcctgtgactgcgaatgtgtcatgagtctaagaaaagatggcgcaactttgtttcaggtgcttcgttcaggtcgttattattagctatctcgactggttttcattttctattcatatttatactaactcgttaaatgtactttattctcgtaggcccacaggagatacgaagttatctagaaaacaatcgttaaaaacatctttagttcctgaagatgaatttttattgtaagaaacacacctaacttttaaaatatgtttcagagcaggagtctgtttcccaagagggaactccctgccctccaggaataactttcaaatgctcagtgcagctgtggggagatgtgcaattggactcccactccaaccacggatttttttttcttttctttcttttttttttaagattt

SEQ ID NO: 11 - DNA, 1494 bp, Homo sapiens
gcgcttctgacaagcccgaaagtcatttccaatctcaagtggactttgttccaactattgggggcgtcgctccccctcttcatggtcgcgggcaaacttcctcctcggcgcctcttctaatggagccccacctgctcgggctgctcctcggcctcctgctcggtggcaccagggtcctcgctggctacccaatttggtggtccctggccctgggccagcagtacacatctctgggctcacagcccctgctctgcggctccatcccaggcctggtccccaagcaactgcgcttctgccgcaattacatcgagatcatgcccagcgtggccgagggcgtgaagctgggcatccaggagtgccagcaccagttccggggccgccgctggaactgcaccaccatagatgacagcctggccatctttgggcccgtcctcgacaaagccacccgcgagtcggccttcgttcacgccatcgcctcggccggcgtggccttcgccgtcacccgctcctgcgccgagggcacctccaccatttgcggctgtgactcgcatcataaggggccgcctggcgaaggctggaagtggggcggctgcagcgaggacgctgacttcggcgtgttagtgtccagggagttcgcggatgcgcgcgagaacaggccggacgcgcgctcggccatgaacaagcacaacaacgaggcgggccgcacgactatcctggaccacatgcacctcaaatgcaagtgccacgggctgtcgggcagctgtgaggtgaagacctgctggtgggcgcagcctgacttccgtgccatcggtgacttcctcaaggacaagtatgacagcgcctcggagatggtagtagagaagcaccgtgagtcccgaggctgggtggagaccctccgggccaagtactcgctcttcaagccacccacggagagggacctggtctactacgagaactcccccaacttttgtgagcccaacccagagacgggttcctttggcacaagggaccggacttgcaatgtcacctcccacggcatcgatggctgcgatctgctctgctgtggccggggccacaacacgaggacggagaagcggaaggaaaaatgccactgcatcttccactggtgctgctacgtcagctgccaggagtgtattcgcatctacgacgtgcacacctgcaagtagggcaccagggcgctgggaaggggtgaagtgtgtggctgggcggattcagcgaagtctcatgggaagcaggacctagagccgggcacagccctcagcgtcagacagcaaggaactgtcaccagccgcacgcgtggtaaatgacccagacccaactcgcctgtggacggggaggctctccctctctctcatcttacatttctcaccctactctggatggtgtgtggtttttaaagaagggggctttctttttagttctctagggtctgataggaacagacctgaggcttatctttgcacatgttaaaga

SEQ ID NO: 12 - protein, 355 aa, Homo sapiens
MEPHLLGLLLGLLLGGTRVLAGYPIWWSLALGQQYTSLGSQPLLCGSIPGLVPKQLRFCRNYIEIMPSVAEGVKLGIQECQHQFRGRRWNCTTIDDSLAIFGPVLDKATRESAFVHAIASAGVAFAVTRSCAEGTSTICGCDSHHKGPPGEGWKWGGCSEDADFGVLVSREFADARENRPDARSAMNKHNNEAGRTTILDHMHLKCKCHGLSGSCEVKTCWWAQPDFRAIGDFLKDKYDSASEMVVEKHRESRGWVETLRAKYSLFKPPTERDLVYYENSPNFCEPNPETGSFGTRDRTCNVTSHGIDGCDLLCCGRGHNTRTEKRKEKCHCIFHWCCYVSCQECIRIYDVHTCK

SEQ ID NO: 13 - DNA, 65563 bp, Mus musculus
  misc_feature (1)...(65563): n = A,T,C or G
tttaagctctgagctggtgctctctaaaagttcagggtctcaggcaagcagggacaggtggtagagagtcaccccagggcaggttcacccacacccctagaggaagctttcttcttccaagagcaaacaaaacttgcagtttggctgtggggcccccagcacctctgaccccatggtgaggccctgagtcctcctaagcgcctgggtgtgcggaaacacctgttggccctaggacgcctgcagcagatacagttcaacatgtgggagagtgctgggtggccgtttccctaaggagccaccaaccacagccacaactacagctggttggattgaggaagtgggcaaggggtgggtgggtaaatgtcctcaactggagagagagtgtcagggaacttggccaggtggcagggggctcatggtcctgaggcagccattgcagcaggctgaggactgcccttagtagcttggcaaggaagggtgtggacacagtactgttgtgacagactttgggccaaggccttttccatatactcagataaagctgtggctgtggaaaaaaaacatcctggcccttgtgctggccagcctggttcatcccagacagtctgaacagaggtagagaaggggaacattaggtctgcagctgtccactgaaaatcctgaccacagacacatcaggacagtacactgagagttcacttatcacaattacccacagtgcccaaagcagatccatcccgcagtggggagcctgaggtattatatatattccacatgtgtatagcacttatagaggccagcagaaggcatcggatcctgtggatctgttgtgagcctccacaggagtactaggacctgagcctgtgttctctgcaagagcagaaagtgtttttttttaattttatattgattctttgtgatttcacatcatgcactccaatcccgttgcacttgcaacttctcccccaaaatgaaacacacacactcacacatgtacacacaaacaagtaaaagcaaagcacagaaaaacatctcatcatggaacctgtgctatgtcacagtgtgtcccacagtagacccctctgtccacacatcttcacttgcaatgttcattgcaaatgttcattgaggcaatgagttattgatctggttagaggtctcaagccatcagtattggatcctcacagggactcctcctggttatgcaggaactgttcttaacttctgggccatctttctagtctgcacactcaggttctaaaatgtgaatacacagttaatggaatgggaactagggagtcagctgggcttcacagagatgttctacagacctgagctcccagtcctcttcatactgttctgtgggcaagctccctcaggagtcttctctctgtttctagggtatctagctacccaagaagctcaactagagacctagttctagggtcaagggaagggcagatggccatacactccagagtgccctccagtccaccttgccacaaaagccactggttaaagcaggattcctaaaccatggagctcagacacacatcaaaaccaaaagatggattaccataaccatagttacttagccatagtgaccttgacctcacactgaaagtcaaaggatgttcccaagatactcaagtctttttttggactacagttcatcttggcttaaattttattccatcaaattgagatgcccttggtggtccaagaccactcaagacccaagcttctcttcaaaacaaggactgtcagtggcaagggataagctctctggaaggctatgaccatggggtgccaggtcagcatggcaggaggaggaaggacacacagccctgtgctggcacagagggccctgcaagaccacctcttctacccatggtggaatgcctactttgtatgaggcaggcttggtctagtgctcctgctgctctgtgagtcccacttccaacgggtaaatattggataaaacctgcaacaataactgctttgaatcttactgacaggctcagcagtgcgggctgctaggagggaggaggatgccccacctcaccacattccttgacatgaaggaggaaagggctacctcagctgctctccagtttgttttattgaatttttgttttgttttgttttgctttgctttgttttgttttgtttttcgagacagggtttctctgtatagccttggctgtcctggaactcactttgtagaccgggctggcctcgaactcagaaatccacctgcctctgcctcccaagtgctgggattaaaggcatgcgccaccaccgcccggcttgaatttttaataatgaatggaaaagccattttcacacatatatatatatatgtacatgtaaccagtaaacacaaatttgtccgtccgttcccccccccccgcccccgtggctttttcaaagaggagagttaggcatagagacctagaggacttgggccctacctttcccacctttaaagccacctcaggatgtttgtgactcaaaccagcctggttgtcttattgtttccttggccagggttgagcagaccagtacagtagtagctaaagatgcagtctgccacttggttcctcctgtgtgtcttcagaaagccacggagcccaggatccaagtgcccttgttagaaacccaggccttggggcatgtcaccctgttggatgacttatagtcactaagacatttcgtgctgtttcatctaaagtccatgccgcaggtgcagatgacacaagcacctacctggcagtttcaggaaggcccagttcacctccattgagcccacactcctattagccttggacaaagctatgacagtcaagactacctttgtcagcatgaaattttccaggctgtatctgcttctagcatggcaagttacctggaaacttgatggcctaaagccatggaaatgtatgttctctcagttctggaggctaggacattattaatttattccttcactgagacaagctcctccccctatagttccttatttctgaggctcgcctccctttttctaacaaagtcaaggataagagcaagctattgattcttgcctctatcaagtgctgggattctggctggaccaatagcctcagttgaggtgtggcagggcctcaacccttccacacagtgctccctgcaggctcaacccttccacacagtgctccctgcaggctctagtgtgcctcttccttctgtgtgtacctttatactcctcctccctacccctctccatgaagtcttctctccctcttctcctaggacaccatgtttagcagggggccaccctgatatataaggaccttatttcaatcgattacatctgcaaagacttttcttccaactacagctacacagactccagggtagcctattaacctacctttggaggacacaccaagatgagggatgctgcaggaactggatgctggtgggaagaaccaaagcagagctagggaagagaggctttgagggccatattgtagggcccagcctggccagtctcacgtcccctcaagcgttcactgctttcagtctctctatacttggaggaccatccatatgtgcacatgtggggtccaggacagcagagaactatatgcaccccctaccctcacctgcttggttctccattcacacagtgcttctttagggcctacgaccctaaatggcacccaggactccatctccctcacctcaccccaatcctaaatcctcatactccctttcaccctggagacgcctgctttctgtctttcaccttctaggggttctaccaataacggtctctatctcagtcacagcatccaaaaaccctgcccagcaggaagggattaaaaaaacaggctctgaacctacagaatactagctctacactctaaggccccattccttctcccaaccttcctccatttgggtcttattgctctgacttgtttctttctctctctctctctctctctctctctctctctctctctctctctctcaggtctcaagccctttgacaattgtctgctggatcttttcctgagattcagtaagagacccctggacacaggtatcaggtctgcaaccactggacctgggaagacagctctagaatgaagaactcaaatacactgaccaacaaatggaggatggagcaatgtaagggacaagctactatggactgcccatagctgcctgtggttcctgaataatttttttcaggttcgctggcctctgtgatcccctacaacactacaaaacccaacaagctctctctccagtcgtgcccccccgaccccccacatccccagtgaccatggtcttgaagcttctcaagctcccaggctggggaggagcataggaggtctcggcacagacaacatctgctttgcttcactgttctctgaaggggctctctggcttgctgttctaagttttcagcagacgttgtcctgattgaactcaggacccccagctttgggggaaaaaggtcaggtactcccaggagtgtgggctctgaggacaagaggatatgatcaggtcagattcttcgtagtagtccacctttcccattgtccccaagtgtcaccctagcttagaaggactttctagccagctcaatgtcatcaaggaatgacaaaaagaaaccctccaacacacacacacacacacacacacacacacacacacacacacacacactggccttcaccaaagaggtcctgggctctcaccccacccctgcccccacactcagctatgggaagccccagtcttttcattgttgaggacagaagagtggaaagccagtaaattataagacctgcccttccacaaggagctcagaagtgctgtcagcacctagcctggtacaacgggtacctggcacatgctcaccagatcgagtcctaatcccatatgcatagccctggcatcctggttccctggttttttatgtttcctggctagtcttagaagctctgctttgcctgtcactgggaatatgagtcctactacagtccgttggctctgccccctgcacccctatgacagtcaagtgcctcagagctgcgcaccaagaaaggctgagagctctccccgtctagctcagacagcgtcttcgaggccacctgaaggactgactggtctgtctctactgattttcagtattccaacagacgttcaccgtgagatgttccttgtgataagcagcttaagatcttgacccccccccacacacacaccttcctgggtcttgtcccagaagtacgaagcatgcttgcacattcgactggcattgccacagaggtgcctgtttttatttaaatggccctgagcaagactgactaaactaacattcccacgccaaccctcggcagtgtctctggtttgggcaatttttttcctttagctgtcaaggcaaaaatatagaattctggtattacttaaggattgttggtttttttttccccccgtctctctagagacccaaaaatagctcacagatgtgcggtacctgctattgttcaagctcttgttgctttaccaccagaactccaggttctccctgtaacccaagccctgatttccaggtccattttcttttaaagagggggctgtgggggaagtaagccagaggacggaagctctaaacatgtctaaatgtgtctgcagcaaattccaggaaacccaggccagtgagaagccatcccgtggcggggtgggaagggtgggagggtctctaggactgtggccagggcagaaggcaggagaaagaaaggatgcagggcctcacagatttcggcagactgggaagcccatccaatcccgggagaactaaagtgaactttttttttttttttaaagttttgaaaaggctatttcctagctatttttatcaccaaaaaggaaaagaggaacgaagaggaaaggaaggagaggaagagaaagggaagaaataaaggggagcgagtgaatgaggcgggagccttggcttttgcagtgactcagcctttaggctggtgaaggctgagctggtactgagccggaggggcggagcttcacagtttcgtcccctgaggccttttctttttggagaaagttctgagctggagcaggcagggggccaggcagggtggaggctccccgcctcctagctctgtaggggtccttgggccccaggatcctgggactctgagggtgtgtgggcagatcctggccaggctccacaaccctgacacaggataagcaggatagcatagtgacaacttcctgtgggtccaacccctgcctggaggtacagtttctgggttcagcctcagttctactggggttcctcctctattaaacccccctgatttgaacagggctgttcaacttctcagtgtgtgctagttcacaagatgcccagtcaggcactcatggccttccttccttttttccctgggtctcttgggaagcaacagaagtgacaagtgactcctcaagagacccaccctaggctgtgtgagcagttgaggggaccctagggcctggataaacttcagtaaggcactgctcagaacatcccccggggtcacctgctagctttccagagcccacagtctgttctttgagcagtttggggactcctggggacaggcaaatagatggcctccatcagagggtagggtacaggtcattgggcctaaggccatctgtgggatgacaataacaaacctgcccagtaggccaggcctacagcctaagtgcacatcatgtgggccttggcagctcacctgcttgggagctcggtgcctgtctgggggacttgcccaggcagcacacgcttgggcctccccacagtaggagaacagcagggcctgcttctaggaggttttgctccttcttaggtttcctgggcactgggaagccctaggcaggctctcagccatacacagggcccttgaccttgtagatggctcagggagattctgccccttgcttaagggctagtcaatacccctgtgaaccttgcctgctggcccaggtatattgccttcggtttccctaagttatgtgtcaatcagcaagcctttctgggtatttggtactgagacccagcagggccaggaccttccacagagacccaagcagacaaggtatcaccaaggcttagctgacaagagtttttgggaagaaagcccagaactgagagggcatcttgcaagacaggggtcctggaatgtgctttcacactggcacagctggggtaaccaacaccagtcacaagggagccagccctggcctgcctgtctggaacaacagttcaggccattgaaagcacatatggagatatagtcaaacctctgaaaaatgttcaaagcagtacttaaagtagaaagagtagactggaagctactgacttagtagggggaaaactgaggcctagagccttgaagggcccaaagtaagctagtcagttagtagctatgattcagagtccagggatccagctcaggggtccaccagaagacagacacgctgtggtggacacagtggtcagaaggaagcaccctttaggttggacacttcttggatcgctaagtccaagcgttgtaagcagtgggattccgagggtggtgatctggaatgttcctgtagctgcctgttctgacagcaccccactcaggacagaacactcacaccctggaccacttcatgcttgcaccccttccctgtgttgtcctctttgtcactccacccaagcataccatgtgccctgaactggcttgactgacagttactctcctagggacatctctgagcctctcctgagaactgggtagtctcattctacctgcaccctaacttctgggtcccacaaggcacaaggtgagatcctgcaggagggagaggcacctgtagcccaggctccggaggcctaacccccctggtactcctgggactctatgctgcccatcatacctgcatacagacctgctccctccaggacaaccaggccatgctggtctgcattcatgatgcgatgcagatgcaggtggttacaatgttacaggtctatcagcaacagaacatctgaggctgagtgagtatttagcaggaagagtgacagctttggttttggtgtgtgtgtgtgtgtgtgtgtgtgtgtgtgtgttgttgtgtgtgtgtggtggtgttgttgctgttgtttctgttggttggctggttgtttttaccctccaagcccttttcctggtagacacaggactagaaggaccaatatctcctgtctactgtgtgaaacagcttcacacccacttgccaagaacttgagccctgccccccacccaggccatttttctggctcagctgtcccagggttccacagctaagttctcctgcctgtgtggttggcctctacttataaaaagagccaacaagtgtttgtgttcagctggtctgctgtgcagccatactcattgctagacaaagacagtggaagagatacagacacccatggacagacgggatggcaggtaggcagatgtcgccaggtcagcgcaggtctccagactccagaaggataaggccttctttgtatccaagtcaggctgcctgctgacaaagctggaatatagtcgacacataagcagttagaggccttcaggacccatctcagaagaggcacttgcagtcaggcgttccttctatggaactgctctctggagctgcagatctcttatataaatatttctgtagcattgggcgctttttctctcgggtactgaccccatgctgctaacccccaggcttgaggccagtttctgagaggagcaggagatgggggctggacagctgttggcactggccctttagtgcctttcaggaacaggtgtgtcaagggagatgggagggtcctaggacaatataatctggggcccttattccttgttgaactcaccaccgtgttttaggatggggaggtgttgttcgttccagattccattgaactttaactgcaaagggataaggaaggcatcttggacgcccagtgctaagcagcttagcacaggatgtccaaacatcaaggtggagataaagcatgagaggctgtgttgacgctagcagtcattgtactggaactctgcactttcccaggccacctaagtcggacacagccagggaccagtgagaagggtgaccgtggaacgtctagactcgggttcctgctgggaatcgagagcgcaatctgtccagcaaggcactagtccttggggagttcccttagggagccccgaactcccttctacagaggctgcgggcgcgacgccatcatcgtttaaggtcaagcgttccggaagtcatggctaagagtgcctggcctcaatcctcctgatgcctatagccgagaccaaacagctcccaggagtggagccctagggacaggacacgcgcaacgctgccagggcgccacatttaaactcctgccccaggattccccccaaacttgacttcagctgctcctgcccacggtcctagacctaactccaggatggagctggttccccgtgcagctttcctttcccacaagacccgtacctcctctactattgaaatgcaaattctggccaaatgtcgcagagggcggctacacacaaagcctgatccttccgcagcgccagctcaaacttttggtctctgtaaactttcgaacaagaagtagttcctagatgcccattccatacacccctccattcctccttgtcttgcgaaccataagatccttagatcctggctcgggacgcgctccctagcccggacaggcgcagaacccaccaaagcgctgggagggacagggtccacaagggggtaagggttcgcaggaaccaggggcggagcccgctgggatggggcggggcaggggcgggcccccataggggcggagcgcccgcccgctcagagcctcactagtgcctctgccgcgggagggagcgcaggggcgtggggcgcagggcgcgggcgctgggcgcgggtgcgagcgcagtgaaggaacgagcccgggtgccttgtagggcccagcgccgctgagagcccagcgccgcccacccgccaggaaagagggcatcagagggtggacgcctgcgggaccgccggtggtgtgcgtcaacgtccgatccccgccggccaccccaagaggccgccgcccgggctgcgggcagctggcgagcaggcatgccacggctcctgacgcccttgctctgcctaacgctgctgcccgcgctcgccgcaagaggtaggctcccgcgagcccgcaacttcgggcgcctttcagaaacttctgttgcgccctgcgcacgctttgggtagataggagtaagggaccagctgccagagttgagagccagagcgggtggacgggaccgtgggacctggtgtcctggcgtgtgaggaggacccttctctttccaggggtacccacttttctcatagcgcccaaagacgctggaagtgtggtatggggccccggaggcccaaccctggctcgcacttgggtagacgctcctggggctcgccgcgggggcggacatgctgcttgcgcctctacttttcgatttgaatcgaatcggttttggtttcctgttgcttcttgggaccatttattttcattcttctttgcctccggcccgtgctagggcggatgttggggtgcagtgtgaggtcaggggcgctatactctcgttgcttacttagagcggggcagagacgatgtgccctggactcctagtatggggttttgggatcgctgtcccctagccggaatcaaactttcgaagaggggcgatgtgcaggcggcttgctgcctagggtgggcgtgggactgactcatttcggaagtttgaaaatcctgtgctgattggaacgggagccggagaggggagcccttatttcccttccggcttcacagaacggggtactcctgttgtagtaaccaactgcactcttctcccagtaatcgaaggagagaactgcctgccctttccttaaaagtggggttttatgtgacgctcgagctcagccctacatcgaggcttaatttttagagctctttaagatggcgtgggaggggcttgattaataatagccccttcccgagaacggggtggaattccttctaagtggggtttctaagaccccctccctgggtgcggcgggggctgcccctggagatgcctgcgaacaggtattgggtgtcggagtaggcggggcaggtctccgggtgcggccccgctgccccaggaggcggccctggcgcgacaatgggccgctctgattcccgggccggcgctttgttggagggcggggtggcgggctccgcagctgtcgctttttcccacgatccggggagctgagtgtggccaccccctccctcctgcggtcccctcgtatcttgtgtttgaactgaggcaagggtggaggcttgtcggggggctttgctgggcaccttaatcccctcccactttggctgtgtggttagaagtttgggagaatttgctaagtctttctgttgccgtccacttcgcctcactatgagtggggcggtacacctgccacctagccagcctatcctttccccactagtttttgactacaatactgtgagcagaacattgattcgtaagccgccccccccaccgcgtcccgcaccccctcaggactgccaataactctagtgcataggcaccatggctttaatctccgtccaccatcaggactataaggagttaggtgcccagaaccaagcctgacctctctcttctgaccttcccccaggcttgagatgctcccagccaagtgggacctgcctgaatggagggaggtgcgaagtggccaacggcactgaagcctgtgtgtgagtaccgcccctgaggggacctgttgcttttgtcagagcagagcccctgccttctggggacagaacactgggctattgtcttcggaagacagccccgaggctgagtgcagtcacgtgctgacttttattggacaaagtctggcaattacttaatcaccagcaattatgccgcgtgtggagctactctggcccctggaggttggcacactccttcgtgggccctcaggctcctgggaattcttggtgccctagttcttatttaaaatgcttgagaaacagttgttttggatgatgagcattcgttctgggacacttaccgagagagtctgagaccccccaccccctgtcacctgggatccctcttcctgagcaggagtgcactaggaaggaaattgacccgtgttgttggtttgtgttctggttttgttggtggtgctttttgtttttttttgtttgtttgtttttttgtatcaggatctcactatgtagctctggctgtcctcaaactcactatatagaccttgaactcaggaatctgcctgcctctgcccagtgaaaagtgcctattttaagacaagacccacctctggactctgtgccacgggcccttgtcctcaggtcaccaactgtgaaatgggtatgacttggggatgggaaggtctgctccatgttgggaactccttttgggaaggatcccggccaggttgctctcaaggactaggcagctgggggaagtctctgcttggcgctagggctagcgcccttcaacttgagttcctccctgatgagactagcaaggtgctggaggctaaggcctcccctggaggctggagacagagaaggctccagcctacatggcacgccctcattccaactgctgaatggctcatccccttgacaacgggtgctgctgcctccagtacccagcctgtgggctgcagccccacctccctggctggcccgccctgtactgaagccaattaagcaggtctgtgagcagtttattggacaaagccgattgtgcctctgtcagacactaatgaatgcacactacttttttttttttttttgctttttttggggggggccttttctcccccttgcagaagcctcacggacgcttgatgccctaaatcttatttccttccattcagaggccgacagctgggattcagtagaagggcagcagctattgttgggaggcgattaatgctgtgtgattaattatgcgtggcttcccagaatgtacaacccccttcctcgcctctgtgctccttggtctgcctgcctcactggcagggcgggctgaaaggtttcttctgctcagcacttggaggggtcctgccagactggggcaattgagggtagtttcttcttagccccgccaggaaaggggcacagcctggtctgctgcctgccagtcacttggtagagttgtgcatggggtacagtctgtttgctgtagtcccactaatagcttgtatcttagtatctgtatggacacctttcaagccaaaggcccaatggtgctgtgctttcttccccacctcccaaacttggggaagctgcttgcaaatcccttgcattacaagccaggccactgaaaggctcttggtgccaggccttctgtcttgcactagatcctaaggcccttcctccttggcagaaaacttgcttcagtttggctcagagttccactgagttctatccacagaggccccattgtgctcactccgtaagtccagtgagatgaaagagatatgctcacttctggtcagcagagctggaggccaaggctacagccaggcctggctggtgataggcacaggtctgggcgcactgtgcagtttggggggctttatagccaatccatagaggggtccagtgtcactgtgtaggcttgggtgattgagggtcccatccattccatggtgttgtctacttcttcacatggcctcaggaggcctatccaagagtttgccagagcatacacagagggatccaccactcctgactggggaaaggcagttcgctttttcctcaaaggaacctaaaggagaaattgagggtagtctacaagcttggagcctgtagacctctgtcacacctagccatgatcctgattgtttacggcttcttgtgctgcctactctgagaagggcctgagaactatggagtcataggacagtgaattagtgcttggtaaagcatctcttctacccaaacggagaacctaccccgaaagctgcggggcagggagtttcagggctcaggattgcaaagtaatcctcttggtaccaagtgccttctcttcagtactagtaccattgaggtttagctagccagtgatcatataggaaaggcctggcttgtcctgtagacagagaagagtctttgcagctgctatgctttgtgggatatcagaggccctttggaggaagatttgggacccaccatgccttccttccttgtgggcccaatttgtgctgagagggaaggacgacaaaaggctgtcatttgaaaagccagaaggacctctacacttgggtaaacatgaattcactgatccaaagggcttataaggagctgcaggccctgaactgagggagctcagggagactaaggccaccttcactgggagccaagccagatgtgaggaggacatgcattttaaatgcatttaggaatcagatgaactatgcccagagaaattcagggcagtgggtgataatcttgggataccctgtgtttgagaggtcccaccttagcttcaccatctttattaagtcagggcagaatcaggattgatatcttggtggtacacaggattgagtaagagctgaaagagtacacactgaagaacacccgtgtctttttcactctctgctggtgagctcgtggggctggttttaagagcttcatcctcccatattaagttgggtgatgaatggatttgccatcccaacagtgctctctggtgggtctgtttgggtttccgttagggacgagctggctggagctgaggatcttagcctgggacgtggctgccgttgtcagctctttcagtttccttttttggaatttctgtgtctgtgcactcagagcaggcatatgtatggaagtccgaggacaacttctgtgagtcggttctctcctagtgagaggtctggggatccaaatcaggtcgtcaggcttgtgtagttcacgtctttcctctctgagccatctcactggtccctcggacactttaaagcaactgctgtgctctgcgttccactccaggtatagcccagaactggactgtactcaggagtgagcgtcatccagcatgtatgtgacatctacatacatggtagacctgccccaccatggcctgacagggctctcagcagatcagccaggatcaggcacagggagagaattcagccgtgcttggccgcggaatgtttcagctgatgccctttcttccttccctccagagtatgtgttatagccacatccctgacccatcacttcctgccctcgtggtgaggccggaagtgattggtggactgaggagggacccaacagaatgttctatgtcttccatctcctggccctgctactgttccattgagtcacatgccatcgtgggttggtcccatccaacccagtaggagagccaagactgtcccaggcttgcctgtctgtgcagtgccgtgtctggccttcaaggacatgaggttagaaaaacaggttaaaaaaaaaaaaacccagcctcacaacttgacgtgtcacggaacctgtggggagatggccaggtaccagaacacctgagcagaggcagagtgttccatgaaggagagtgtctctgtgggcagccctgcctctggccagcagccaacagtttttccattgaaggaataataataatgctaaaggagagagaccgagcacaagctgtgacctcagcaggaagagggtggggtagagcagacaggagaaccgtgtttcaaggagctgagaaggatgcagataaccagagtggctactgggatccccagaagctgggtggtagaagaggggtcaccacaaggtttcatgcccagggtcaaagatggaagctccactggggaagatggtttcggcacttactcctggtccctgtggtggggtactagacatcatggtgggacagggcccagagggcagcaggctgggctgaggggttgggctctcttgtgtggggagggtatttcatgtgtcatctctaaatagtgagaggatgtggctttgttgtcaagtggcatccacgtttgctttcctgaaaaacatgaaagcagcagctctcgcagggctttgatcagctctgcaaacttggtggcagagggctgggttttcccagagggcctggcccaccctgcttgtttcatctccagtttataggtgggaaaaactgaggctaagggtgaagaggctggagggtgggggacctaagggccgcttgcatcagctttcaccttcatgtgcaggcgtatccagaactttccagacctttcccagaggctgagagggaatcaccagctttaacgagcggctagcttcagggcatcgttgtgactaggtcaggacgtgtctgattcccccttgtttcccaggcagggcacaccctggcacctgctggctggagacatggaccagctggttgtgatgagcagtactccagtctcagtttaccctttgagcatgagagagcaccggaacctcctctctactatatctagcctgggctgagggataacctacaggtgttaagagtggctgcttttggaggtagcagctcctaggactatctatgtggtagggccagttcttcgagctggggcatattttggcctcaggctggggacacctcacctactggagaggggagtgattggcagggtgggagggcagtggatgtcttttctgtggccttaccccatgctatctagctgtaccagagaccaggagtctgaggactgatttgggagatggggcttttgggtggtagattacacactttgtaaactatgccatttgagccatggaaagtgcacaatgcagtgtacttaatagaggcatggattgcacaacctgcccacctatccagttccagactccttaatcagcccaaaggcagctgcttatcaccccctcccctccctggcagccactgagctgctctctgtccctgagcctttgctgttccatttcctgtgaatggagttacccagtctgtggccattgagtgctgctttctgagcacggatgatgtcagggtctcgcagtgccactgtgggtgccagctctgcactcctgttaggatcatttccaacttgtggcgccttcaggatgagccctgttctgagtcctgacaacagcaccaagtggccagaatgtacatctctggtctcgtgctgccccctgagaatgctccttaattgggacctgatgtgctctcctgttggtcactgataatgtgcccaaggcctttacagtgctcagtgcccatggcagactcatagccagctatccttgtcttgccttccaacggccatcttgcctcttggccttttacaacctgaaggaagagctagtggagtctttgtgcccggtacaggacaatggaagcagaggatttttgctgagagcttcgtatgctttgaagcctaggatctagggcaggcaaggcagccaacccacctaggcacccagctatgaggagatgggaaactagggaagatgggagtcagccttagtctccacagagtgaagcttgaggaaccgtgtgtctgagtgccctgggccttccacagcttggcatgaggcccactacagggtggcatctacagcagcctggatgaggacaggcagggagccttagccagcaggagcaatggataggggcagtagggagggaagctttggccctgtcttccataggcttgtgctgtgattttcccgccacagactaggagatttgaacaggtgtgccagtctatgaatagccacaggctgttctttgggagggacaccaagctctgggagatgagagaacccagccctttaccttagaggtagagagtatccttcagttgcctctgatgctcagagggatgtactatctcttgcagaactgtctccctagccagcacaggtgtccctagcggaagaggtagggatggctggatggacttggtctgaaggggctgctttctcagtgttcctgagatctacaagattctaggactagcccctttcccagggacctcacctctagcccgggccttttatttccttgattattgctctctttttcgttttgtgaggatcgatgttgtctgcatgtgtgtgtctgtgtgagggtgttgggttttctggagctggagttacagacagtggtgaaccgccatgtgggtgctgggaattgaacctgggtcctctggaagagctcttaaccactgagtcatctttccagtccgtagactgtgcactaccctggactgaagtgctctgggtagaaggcctcccaactttaccctgtgctcctgtcatttacactccagagtgaattagccaggctaattctcctcctcctgcccgcccctccccctttagtttctttgattggtactcacctggtgagttatgtccaatgctgaggcacggggaggaatgactgtctccagttatggaatacggccaaatgctggttccagccttgctctaacaggcagataagaggagttgtcattgggcttgtgttggtttatcctatcacctggcttggtgtccctatgcaactgacatgcttggagacctacccttctgaactaggtaaacgagccccctgtcatctgttgatgctgctaatttgctgaacaaattctcccacaggtagtgccagaggccagcctgacccaagctccagcacaggcctggggaggcaggtcctgccacatggactgtcagtcttgtgtgagcaatttgctctgtgccgtcagttgaggattttgaaaagtggctatgtctacccacttcttgagagttcttagacctgagctggaggacaaaggactgtccttctcttaagatgatacccaggcaccgaggccatagcttggctctgggtcaccctgttgccttaacaccacatgtgggtcacccagtatgaatcacagcccagccacagggaggccggggagccgcaggctgcatggaagccactgactttcctagagaaacatctgtgtttaatcaagttcaggaagaaagctgggcggcagcctgctccctgaagcaggttttcccacggcctagaagtgtgtgtgtgtgtgtgtgtgtgtgtgtgtgtgtgtgtgtatgtgtgtgtgtacatgcatggaaggtgcgtgggaaggggaggaagcaaggttgagagtggctttctttcctccacatgctccaccttcatcttttgtggtagagtattgaccctcaagctgccaattcagctagccagccagccattgggcttcagagatccttctcctgtcttctcttctggaaggctgggctacatgccaacatgtcagagttttacctgggttccttccagaggtttgaactcaggtccttgtacttacacagcagctactttgcctattgagtcaatattttgtgtgtgtttgtgtaggtgtgttcatgtctgtatacttgtatactggggtgtgtgtggaggccaaaggtcaacactgggtgtcttcttttgcaccccatcttatattttataacagggtggctcacagaacctggcactcactgcttcagctagagtggctggctagcgagttccaagggtcctcctatgtccacctccggcactacgatgacaaatgtgtgtgctgccattcctggctcacgtgggtgctgaggactgactctaggtcctctagcttgctcagcagacattttaccagcagagccagtgtgccagtgtccttactttaaaagtagatttgcagatggagttcttggtgcacagcatcccctactgtagaccagatcccagagagacccagggaggaggcagctcacactgggatctgacttgctctctccaggctcccagggctattgctctgcatggggaggaatgtgggtggtaaaggctggaaagattgctcaggtctgagtggcagcagctccgcctcccaccatttcctctctgtttcagttctgagtgagcggaaacagcacagttactggaaatgagaggttggggggttggggggaatggggcttccagtgtatgtgcctggtggctggcgtagaggcagatgctgcctttgtgcctggccctctggttcttctcggctctgcttgctcatggcttctagaggttgatccttcgaggtggggctttccttccttccttcctcctctgagggtcagacgaggatgacctcagctctgtctcagggcccgatagtggaaaccaggtggggcactgatttgtggaacagtgttgtgacaggtcaggccgtgactgcatcctaacttcatggctcagagtctggcctactggtctggtgagatggactggaacaggtgtgggggcaggtgggtagccccaggtttctaagaagccacagtgaaggcaggatcccccttcctcacagtatactcatgcctggcctctgagccaggcttgtttcccctctaaccccctgttccagtaggctgtgcctagtcaaagctcagataaaggatacttccttcctccagagctggggctgcaactagtctcacacttcctcttcctacgacaggacccatatccttggggtgaatggaggatcccatggggccactgtagctaaaggtgctggctggccttactgctggtatatgggcttcatttgtctttgggggggggggtctcactttgagagccatgtgtgttaccatgaggctgcagaaggtgcccgactgacttgggcagctcagacctgatggggcgtgtccttttcattgtgctcagtctcagctaaggactggagagggcaccaggatgccagtgaagtgatacttgaaaagaggccaagcgtgggacatcagtgtccacggggcagaggggccaggacctgcaagctttgagcttgtcctagacccactggcctgggacaccctgggtcctatacagctccctccccagagtacctcctcttccctggaccccttctagagcagggtacattcaactggctctccttctcatctttcctgtgtcctaaggcagaacagaagattctcatggatggccagtacactgtgagacaatttgtgaccattattgggatgggaccttcctatctgctgcagtatggggacctcccaagcaggggacttcttccttgttggaagacatttggttgaagtgggggctgctgagttttgaggagtggggtgacctctggggtcccccaccaaagctgcagtctgcacttcagcaagtcattcaaagaattcactgaaagcgggtttcctagggggccctggaagaatgcagccaagatctgtgtcactttgtctgcccagcagccagtgtggctctgccccagtgggtagctggacataggcttcatcagcacatcttcagtgccaccaactggaaacgatagccactggggtggtggcaggtgaccagccgctaggagggtcttgaggggtttggtgaagctgagagttttgaggtttcccttgcagtcagtggcaggggcttcccaattctgggtccctcactaagaaccctgcccccttcctaggagttttgtttcagccaaactcccctattgtgtgtgcctttgccctcccgcgtcccctccccccccaaccccgagatcagataaccaaagagatgaggcagtttgggatacaggaaacttctcacattcccagggagcctctgctactctgtcttgcctgtgactgttctctgaaccaaggctgttccactgtgggtgtcaggaattaagcactacagaatctggaatgtatatgcagagcctgctaagcctctgtcttcccatctgtaaaatgggcctagcccacctccaggactgtagtaagagtctagtgaggtgaagcttctggcatccaagggcctagtttagccaggtaggagcatgtcttctcttttgaactttgatgggcgggggtggggggggnnnnnnnnnnnnnnnnnnnnnnnnnnnnnnnnnnnnnnnnnnnnnnnnnnnnnnnnnnnnnnnnnnnnnnnnnnnnnnnnnnnnnnnnnnnnnatagctccctctcaccatcttcacatttatttgggggaagcagcgatggacaggtgctttgttgtagatctcagtttggggcctctggcttcatctctctctggacaaagcttttccctctgcttagtgggagcagcttcagggccagggctaagttccagagtggcctgtcgttgtccactgtggctatttctagccttccttggtactgctgcacacacagaggtttgtccgcatgagtcccagggaccactcagagtggctggcaggcattgtggagtggaatgtgggaagacacattcccagccttgtttgcagcttgggactgtctgtgttttgggatgatcaagcaggaaactgtccctagtggaggcaggagcttaagcaggtgtttttcacaccctagcagtgacccctgcttcctggtgaccctagtttgctggatggtgctttcaccaatggtggaaggggcacactgggtggagtctcccacccctgctcccgtgggtcaccacttcccacagaccaacttcaggaaattgtttaatgccacccccacccccaggagcctttttgcccccctcagaggggccttcaccggcagcagcctggaggggagtattgttttccctatagtgggaaaaggtggcttccctagagggcaggttccaacttcaactgtctcccacacaaagggcttccctgagccaggccaggaagcctgcgcttttcctgagcttcctttttcagcgtattttaaaccacccaaggatgcaactgtgaggaaagatttgaagacaaaagagctgagtgtgctgggagtggttctttgagctggaaagctggaccctggcttcaatcctggccagccctgcagccacctgtccacatgctacacctgccctagtgtgacccatgttcctcctctgaccactgctgtcccagtctgaccagcagttgatgtttggtccaggggtgtctactttctacagtgctggctgtcttctcagcttcctgccgctgtgggagccagggtccctaaggctgggaggagaatacagtttggttattcctgcctgccttccctgctggcgcaggtgaggcactgatgctggctgtaagcagcagtgttgctgtgccctctaggaacgatgctggcagatacccacgtgcttgtgcacatctatccacagtgaggcaggaaactgggttgaagagggctattctcacccaatgttctaaatgaccttcaggcaagtgtttggatccaggcaggtttagcaggagagcgaggcacttgatgctctttgccttgagttgtgtggggaagagcagggatggaactgtagtctgtaggggtcccctgtctcttgggcttgaatcaactgttctgaaccagggaggataccagggagtcactcagcctgctgtaagcaccttccttcatcgaggcaccagaatttagggggcttgggctagtctctgctcaggtcccagggccgaggtcccagaacctctctcctgccccccacccccccaagcctttgccctggatggggctgggtttgttgaccctgtgaaaatcctacaaggtgggatttgagtgagaggtagccctggttttggacccattgtgtgaaggttgggtggcaggcagcaagctttactgtatttttactgaaaagaacaaaatcaggctggggtagggatctgcatggaaccatcccttgggtacaagagaatggtcaccacttgttgagtgggagcttgcagaacaagggcttcagctatacttgggtggctgcagacacaggtagagcagactaaagaaggcaaggggctccctccaccaccatcactctcagtggtgctggggacctgaggtatgcagtcatgcactgagccaccctctgcctctgggccctaggagctcagatgcctcagtgcaggcccctggtcccagagaagaataagcaagagccttgatgctcagataggggcctgtggtgcctccagtcctcagatgggggctttaacctgtgcaatgagtccatttcttgagggagggactgtacttttgtgactcaaacctagccatgctcagagtgagagtccctcagcaccttgcatctgctggtgcctgctgcaagggcctctcttcaacatcccccctcgagacagacaggcaggcagacagacaggcacactcacagagagagagagagagatctttcttgcaaaactgaggtgccaaacttgagagttccatctcaccatgtagcagttaaagcagtggagctgggagggtcctacaagacgtgtcccttctgaaagtgctttctctcacaaggtcttctggcccctgggttctgggaagccaatgaaggggctccagtgtttgacaacccaccctaccccctccccaccccagctatctcaagtttagtaaacctactcctttccccagccctacttggccataaacccaccaagggcaggagctaaagaactcccactacagtccctctgccccctcctcattttggggtggaaggagctgtcatctgtcccctggaggtggcagatggccatgtagtttagaaaggaaaacagcactttagaattagtcccgggtgagaggccacagcaacatctgcctctggatgctttggggagtcacatttccatggagtggcgctgccagggaggtgggagtcagcacagtggaaatgctgaagccgccaacaaagcccaggcagcagttgtgggatgtcaggcacaggggccatttgtactcctctgagtctgcagaagccaccccttcctggggccccagcctgcctgatacttacctgcagccagccacagtgggacaggtcacaccccaggcaatggagtatgtggtacagaagaggcaaagtggagaagcaggtggcctaaggagccctaagaaggaagtaaggggagggcacacctgccgtggccgggttcccactgtggaggacgcccgaggagagcattgcaggtggttctcatctcgttgatggctcgggctctcatcctaagcaagtcccaccttcccgttctgggaaggtttttccctacctagacaagaggtgactcgggaagcagaggacatcctgggtcactcggggaggctctggttggtgttcggggactgcccagtgagtggggcttcccatgtagggcttccatgcctctatgttgctcacatccactgacactgggggattgtggccatggctgtagcccagctgtggcctaaatgtcccttcttagggacatttgaatgctgtgtggagagcacatggccaggtgttacagaggtcagacaggtaggcggtagtcagaggagaagggcttttgagctgttgtctgtctgccagccccctgtcctagacctagaccctgccacttggctccaggcatctgagggatgatcccatccaagtggccctgctggtcctccagctatggaatgctggtggtggatggtggcctcagccatggtggtggacccaactaagcaacatgcctgcgctatggtgtccccaagcccagggtggcagtggggtggacaatgggccttctcagccaccacattcccccacggaggagcgtccctggccaccagcttcccagctcctgccccacccgctggtgttggcgtctggccgcgcccagcaggggcagctgtcccctccacagatgcacctgctccctgctgccctttgtccacgctgccggcgcctgatttattggccatattttcccccttgctggtccagcggaacacagcagtgttggcaagtgtgcatcccatccaggcgggttccccagtctctcgctgtgcttcttattcagggtgctgtagggaacacagcccatggccggagggaagaggaatgtgagcaagcttggagcctttggttacattcagtgtctttatcctcagagacctagcgggggttgcttaaggactggagacctagcatcaggcttgccccatttttccctcccagggaaatcttcccgcctcttggagcctcagtctcactggcctagagctcccccacccccttagcccgcaggaatgggtggacgcagcagctccattggctttgaagatgaagctccctctgtcccttaacactccctcccccgtgacttcaccaatggctgggaaagaaaaaaaaaaaccttttctccaagtgggctgaggccaaccctgcttgacaaagaggcattgatccagagaggagggctgcttctaggggccagcctcagcgggcagatcccaggctcccagcagcctctccagcaggctagtaactggatccatgagtagaaaggcaaagactgcctcccagcctccccaaggtagattctaccagagcctaggtgcccccagagaagcaggtgtggatctcagtggctggccacactggtggggaggtgccttccaaggctacccccccatgcaggaggagccagatgtcccccatccccaccccaccccccacaccaaacacacttcccatgctggacaggaaccattgcaaaggcttgcgttaactccctggggagtgggggtgtgatttgttttctttaagccagttggtttgagacttttggcttctggcaacagatggtcaccagagtggccattttgtgtcttccatacccaagcggtagacacagatgaaaggcttcagagaggacagatgtctcccagtacttctactgagatacctgaccccagaccccatgctgcctccagcagctcttagtggggaggcctctcctggggccactctcacacggggtggggggtggggttgattataaatagttgtttagaagcaagtggggactaactggttggctggaggtagggattgaggcaagttacagccaaagcttggggtgcatggcggggtgtgtgtgtgtgtatgtgtgtgtgtgtgtcaaggggcagtctgcatgccagtgagcaggctctggaaatcaggatgggctgtgtgtagccagcacctggctgtgaccctgccatgggggctgtcctgtcagctagcacgttctgcctcagagcctttgcctctgggaagagcttggcttggcggctcccagagccttctgtgggagtgtggggccaagaggtggggcaagagtggggtcaggggtttatggcccaagctctgggagctaggcagacaggtggctgaggaggctactgagactggggcagtggcacaccttgagcttgtccccgtagggaaccagcaaatctaagcctggagacagcaaaccccctcacctgtctggaggtgggtcaggctttcagcctctgtccttcaatgaatcatgtcctcagaggacggtgctgatgctactgatacagagtgcgtggtacagagtgcggggtacagagaacttgtgtctggaggttttatttgtccctgagggggtgccattttggtttgggggtatgatatgaagaacctgtgtctgagagcggagttgtagagagtgggcagcagccagcatcctggcatagtccccttgctacagggcaggaactgaagagagagaaagcacacacagtctccagtctgctctgcttcccgcgtccactgtgctattgatgtttgaaagtggaaggaaccgtgaactcttttattacccagatgatgcatattcatgacagaagctgggagagaaaagcagaccagcctcctaaatgagagtttcacagagtctatgtcgacatccccccacagggctggggggagggggctctgctgcgcctgtaggctcacttcgagtgtagacccagatttgaaatctgcctggtttgaaattcaggctggtcttgtctctagcctggccccaattaacagtcattattatttcttttttattgaggtgaggttcacttagtatgtgaaagtaacccctttaaagtgagcgcctccatggcatgctccagagcttacgtcatcccagaaacctctgcccagcaagcagccactgcacctccattctagagcctgattccagttgcacccactgcccaaggtcgggtagcctgtggccatgagagatgagggcggggagctgactgccctacatgtctgtcaacagctgcagcggagcctttgtgggccaacgatgccaggactccaatccttgcctcagcacaccgtgtaagaatgctggaacgtgccacgttgtggaccatggtggcactgtggattatgcctgcagctgtcccctgggtttctctgggcccctctgcctgacacctctggacaacgcctgcctggccaacccctgccgcaatgggggcacctgtgacctgctcactctcacagagtacaagtgccgctgcccaccagggtggtcaggtaagggctataggaggttgtgaacttcacggttgggacccttaggcctgggcccaaggaccctatctttgttgacttgacatactctggtacactaaactttatcctctcctggatcagagttaagctgggatctactatccagaaaaatcttggggattccttgggaactctggtccttttcaaccccaaactatctgatttttggctgccctgttccaggaccccaacctctcactgtttctgtgcgtaaagaatgagtcctcatgtagcccgggtcttaccatctccttgtcagggtgcctcaggtttccattgcttctctatgtggggtccaggagacagctaggtacaaattttagactgccattcctactttctgtccttgagcagtcacttagtctcttatgacttacagtcctctgtatgcagaaagatggccacattctgcaacagatactgagcatcatgaagataacactttagatctatccctggttggtacctacatgatgtccaaatctgccctgggttcacagggaggccctggcaacagctgaccctcttctctgcctcccaggaaaatcatgtcagcaggctgacccctgtgcctccaacccctgtgccaatggtggccagtgcctgccctttgagtcttcatacatctgtcgctgcccgcctggcttccatggccccacctgcaggcaagatgttaatgagtgcagccagaaccctgggctgtgccgccatggaggcacctgccacaatgagatcggctcctatcgctgtgcctgccgtgccacccatactggtccccactgtgaactgccctatgtgccctgcagcccctcaccctgccagaatggaggcacctgccgtcctacaggggacaccacccacgagtgtgcctgcttgccaggtaggttccatctcagtatgctggcatctagcctggttgtccatgtccatgcgtgttccactgtcaagcccgagggatgcagaaagagttaataccctttgaagggagcccaaaaagaagtttagagaagggcagcagccatggagccttaggtgtggtataagagcaggtcaggatagggataccagaagtgaggggacactctcagtgacaccacacacgtctatttctgtctgggccatctactgagatccagttagtttggtgcataacctccaagccttctttctgctgataagagtgccttcccttggtattttcttcatgctgggcctcccctgacccatagccaactaatacccaccatgtcaataccctgagcctcttagggcagggagccagcctgcctttacagatgctcatgaactgtttggaatccacatgtgactctctgtatgttacgggagcaccctgtcatgggcagtccctggggtttcccctttctctggggatggtaattgaataacagggtcttgagggccttaggggcctcacgtttttcattacttcctctgcagtgttcttcccactgtgctcaatgtctctgcaggggtggggcctgcaggcacagccctagtcctttctgttgctgctctaacgatggtaactcggtgatctaaggcagcttggagctgccgccaacccacttttggcaagggtggggttggtcaacataccaggccgttgagaggaaggaggagtgggctcaggaaataggaatagatttggttgctgggggtgacctcggaccactccccttgcaaccccggggccaccctacacactgaaaaagggaagttcccttctgccccaagcttgcagagccagcctcaagactgcgtgcagacactggcttatacatttcctgaaagtcattgggcaagctcggaggtagccgacagctgcctacacgcttcccagcctccctgggggggctgggacaggatcctcacgctcaggagggccccagagctgagttcagctctgtcttggtggccacctaagacctcagctgttagaacctgtgttgagaggctagactgggtctgtcatgcagactgagagaaagccttgttcaaggagcttgtgaatggagctgccaccaatccaccttaggcagggtggggtgggtcaactcagagtgctggaagatgggcaggagggaagcaaggactgggtggggtccctttaccttagccggtgggtcatccctgaagacggaacacacactaccctgtgctgtgtggagacatgctgtttcagagtagggagaagtgaaaattgtccacccaaattgctgttgaagggagtccggtctgggcacagttatacccaccatttgggctcccaggtagctatttaccaggtttcctgaagaatgtatgaactagggtggacataaagaactaagatgggaacagaacttaagcctgagagctgactgggaattaaagcgactctggctcctgtatatctatcctctcactctctcacaagcccggtttccctggaggaggctgtataggcagagaaggctttggccaggctccacataggacctatgatcccttctcctcgcccccagtgaaatccttctacacctgctcagggcccctccaggctcgcttcttcttggaagcgtgccctgtgctagaataaatctctgcacaggcagggagacaagctatttggtcttgctgacccctgggcgggcactaggctccaagttggttcctccctcacccagataagccttttccaagcctccagcttcttgctgtggtgcaagatggtggggtggaggggcatctttgaggaggaggcagacaggtgggttctccaagggcaggaggggttcaaaggcatccccagagatggtgttaattagtaaccggctgcaagtttggctgttgccagactcgcctttctgggttgatcattgacccggcaggagttgaggagattaatagctaactagctgctgagcaggccctcaggaagccacactgcaggccacaccttggggcccagccccaggctagatgggcttgtagaagagagatggttgccctggctgtgccctgaggaaatcacaggttctgactgagcgggcctgcctggatcccaccactctggtttctaacttagtgctcccaagccccacttttagctccagcagttttaggtattcgtggctgccccactgattcagtgtggacaaccatagagtgcaatcctctgaaactctgttagtggttttgtggcagaacctccaaggacactatgttcctagatccctgtctgttgagtcagctctttacatagcgactttctagagaagagctgtcacctgtggacacgggagtagggatgccacggaaggacagacagatgccttgtccagagcagaacattgcaggtccacccagaatctgaagataccggagcccacccgaggctcctcagcagacttctgaggtcaggctaacctgctggctggcccctgtcccacaggttttgctggacagaactgtgaagaaaatgtggatgactgtccaggaaacaactgcaagaatgggggtgcctgtgtggacggcgtgaatacctacaattgccgctgcccaccggagtggacgggtatgtatatgggacttgtaggcagcagccttccactaacaaaactgcacaccgcggagtggtaggaaggtctgaactctgttccacgctatgaaagcccacactgcaagacccagggtggctggtagcatggagcagcagcttctgtgcttccagttggagtcagcacagctcagcatcagatggttcttgtgagctattagcagctaacatccagagtcaggccccccagcactgagccatacaggagctagcattctgggcaagctaccagggatgaatacaaggttgtcctcagccccacagcccagagcagggagctcatcttgtagctgaggttgatggtcctgtgacccctcataggtcagtactgtacagaggatgtggacgaatgtcagctcatgcccaatgcctgccagaatggcggaacctgccacaacacacacggcggctacaactgtgtgtgtgtcaatgggtggactggcgaggactgcagtgagaacattgatgactgtgccagtgccgcctgtttccagggtgccacttgccacgaccgtgtggcttccttctactgtgaatgtccgcatgggcgcacaggtaagtcggtgcaggaatgtcctgggagaagggaaacttggttggctcaccacccctggtggaaacacctggggagccatgtatgagatatatatacagatatatgtgtgtatatacatatatatatatatatatatatatatatatatatatatatatatatatatatcagatatagatacagctcagatgtagatacagggctggaaatgcagcacagttggtagagtggctgcctagcatgcacaggatactggactcaatccctaggaccacataaactgtgggtagtggcacgtgcctgtcaagccaactcccagggaagagtgaatccaaaggttaaggccatctttagctatatagcaaacttgagttcagcctggaatatgtgagaccctgttttaggaaagggatggggagagagaaagctctgtctctttggcacctccagcaatgacccagtaagccttgctggacagaggcatcctggtgatctgaactttgtgggatgcttgagtgagtcagagagattcattccagggtgttgggtgaggatggccctgctgcaacaacctgttaatcccaggatagggaaaagcagcacccactcaccgcagctgccttgtctaggtctgctgtgccacctcaacgatgcgtgcatcagcaacccctgcaacgagggctccaactgtgacaccaaccctgtcaacggcaaagccatctgcacctgcccctcggggtacacagggccagcctgcagccaggacgtggatgagtgtgctctgggtaggtacagatgcagtggcacaggcagcaggaacgggctggctgtcacatatatgggatgtgatctgtcctggagaaccaccattttgatggcctgggctggggcattgcgggtggtcgggaggctgcaaggccagatgagccctcatccgtgcctctttcaccaggtgccaacccttgtgagcacgcaggcaaatgcctcaacacactgggttcttttgagtgccagtgtctacagggctacacgggaccccgctgtgagattgatgttaatgagtgcatctccaacccatgtcagaatgatgccacttgcctggaccagattggggagttccaatgcatatgtatgccaggtatgtcttatgccatttcccaccatgggggctgctaagagcaggcagcaggggaatgagtcaaggctgcatagcttcaagtaacatttctgtcatggttggtagcatctgggaagccgaggccaggataacaggacaaagtggagaatgtacccagagttgggtgcatagactcagtagatatagacatgaaccacagtgggcacattaggcccgtatgagggagggttatttctctcccaagtcttcagctggggctctagaaggacctaccgaagccgtcctcggtctcaccatctcccgtccacaggttatgaaggtgtatactgtgaaatcaacacggatgagtgcgccagcagcccctgtctgcacaatggccactgcatggacaagatcaatgagttccaatgtcagtgccccaaaggtgaggccacctacttaccacaggacccgtatcctcatgatctcttcccagactcctttgagggaggacttgagttgactagggcgttttcaggctttcctcaaaaggtaaaggcccacgtgagcagtggacgctgtaggggacctggcaccggaaaccctttactaaaggagggaaggatgggcaggagctgcagcgctcctaagataggagagtccacctgcttggctctgtcctcttcctgatggtcatgggagtaaggacatagtgtggggatctgacctctatgcctgggaaggacttggaggaactgaagaggggaccaaagtcctgggaatctgtctcttgcctactccagggctggaccaggccttgggccttctgagatgtaaataagccatcctagacttggtccagctaggggagtcccattcacagcctagtgcagctgtaaccatagcaaccagagtctatttaggaaaaaggcccctctgttgggccaaggaggcagccactgagcagtgctaaacaaggagctgattagaggggcagggtgcaaggggcaggatataagggctggttgaagcctggaggttagtggcccctgttatcaaagtaccctctagggagcccatgtgagcagacattcaactctaaggtttgtgggtagcaaccaaggggttaggatactgtcagatataaccatctcgtcttccctggccacaggcttcaacgggcacctgtgccagtatgatgtggatgagtgtgccagcacaccatgcaagaacggtgccaagtgcctggatgggcccaacacctatacctgcgtgtgtacagaaggtacaagaggcagtgcaagatctgggggagggaactcttgaggctagatagtgctgagaaggggacaggaaactggggaggccttagtttggggccatataatctgagagtcagaaacttaactccgcttggactccaggcaggagtgatgagaacatccctgggtatgtgataccccacatccatcgatgaccaggcagtgatcctgggcctgctcggtggtttgccaaggtgtggccaactaagtgttgagggagtaactggccctgaagctcactaatgtccacctttcctgccatctaggttacacagggacccactgcgaagtggacattgacgagtgtgaccctgacccctgccactatggttcctgtaaggatggtgtggccacctttacctgcctgtgccagccaggctacacaggccatcactgtgagaccaacatcaatgagtgccacagccaaccgtgccgccatgggggcacctgccaggaccgtgacaactcctacctctgcttatgcctcaagggaaccacaggtgactggccggagctggcagtgggtggaaaagggtgaggccaggcttggaagctgaccacatgtcatgctgcccctagggcccaactgtgagatcaacctggatgactgcgccagcaacccctgtgactctggcacctgtctggacaagattgatggctacgaatgtgcctgtgaaccaggctacacaggtgagtggctgaaggcagaggtcagggtcatccctagagtctgggagggactgtggggctagccagggtccaagggctggatgtcacaagctgggtgtcaactacccagatcttgatctgccaaccagtagaggtatctatcataaagactgggtggcctccatatgcctcctttcccctgtcagtgtcagccctggccatgccagacttaaagccccagtagcctgaagtggggtggccagagctccgaggccaggcttttggatatgtgtttagatctgataaaatccttagtttctctgagcaccgaggacattgtccaccagaggatagaagaggatgggtggtctcaggctgaggtaaagctgggctgcagagtgactcagttggtaaggtgttgacctagcatgtgtaaaccctgggttcagtcctcctgccatgttaaccagatgcagtggcatgcatacgttgtaaccctagcactctgacattggaagcgagaggatcagaagtttaggtcattctcagctacatgtgagtttgtggccagactggatcacatgaggctcagaagctactggcactacggtcatgtaactcatcgctacataaggcactttactatcgctcaaagtttcatagattagcacaaggggaaacttagacccagctaggtctagctctaggaggggtaggctctgggtggcaggcctggaatctgagccccttcccacccacaggaagcatgtgtaacgtcaacattgacgaatgtgcgggcagcccctgccacaacgggggcacttgtgaggatggcatcgcgggcttcacttgccgctgccccgagggctaccatgaccccacgtgcctgtccgaggtcaacgagtgcaacagtaacccctgcatccacggagcttgccgggatggcctcaatgggtatggcagactgacctgggagggactagctgtagccttgggcagacacaggctgggtgaatgggtgctcctgtgagaccagtgatctgaggtcagcccctagtgtcttcccagcatccctgggctgtatcctcattggctagcatcagctcaggatatagactctaagcacactgtggctgctgaaacagttgtctgatactgtggtgacagcagccctttgtcagtgtgtgggggacgaggagattactaaggtctccgttaaaactattaaagttttatacagagggtcagcattgtcaaggtggcattgttccagtctggaacccttgcacggtcttgggccaggtgggtacctccagcccagtggatgatgtggccttgtcctcagactggaactgtagtttagcaggagagctctgagcccaggctacagctcaggcctctccgtaggtacaagtgtgactgtgcccctgggtggagtggaacaaactgtgacatcaacaacaacgagtgtgagtccaacccttgtgtcaacggtggcacctgcaaggacatgaccagtggctacgtatgcacctgccgagaaggcttcagtggtaagtgtggcgggtgacacagcagaatgggtcctccctttggtctctttctcggtccacctgatgagctagcatttctcaggcagagatcctagttctcttgaggaaaggcatagggcagaggctctggcccacctcctcttgctcaacttccttacaggccctaattgccagaccaacatcaacgaatgtgcctccaacccctgcctgaaccaggggacctgcattgatgatgtcgctggatacaagtgcaactgtcctctgccatatacaggtacgaacagccagggactggaattggctctggtggtagctagtggagctaagagtatatgggcttaccaggcactgaagaaggttctgttcctcgctgagggtcttaggtcctcagactggaactgtagttaagcaggaaggctctgagcccaggctacagcccaggcctcctgggcctggggatagtcaccagatgggcaaacacagaggatgcctaggaggaagctccaggccgtgtgtccgggtgtttatctggtatgtctggagtgaggtgagcactggactcctccagagaaagtctgggaggctgactggtaggtactgcatggatcagggtccactttgcctgtgcctctgggggccctggctgccctcctctgctggctgggcctgggattcctttgatggcagcttctttgtgtgaggagacaaggagccctctgttagatgaacagaggcagctcctgccatgggcactgcctgaggaatggcgagaaatagaccccctgcaggagagatgtgcattgaacatgaaagccgtgaccacatggcccccaaccctgcagctcccaatactgccacagagtactggtggcttcatgctgctgctgctaggttctggacatagcaagtgggtctgtgaaggtggaggcccttccagtgttcctatgatgcctggcaggatgctgttttctttgacaaagttaaagggcctggattttgtctcctgtgttggtcagtgaggaaactgtcagcagccaggcacaccccatgttccttttggtcttgctgctatcggggctagcgggaggagtcaagccgcgctgaccagcttcctgcttccctttgcacaattgtcggaaactctgtcaaagttcctgtctgcccaggtcaccgtggaaaccgatagagagagaggccctggagagtctcaccagtgggctggggacatggtgggagacaaggaagataaggtttccttgcttagctcctggagccaaccatggccataaacaggaaagctaactgggattgcaaggagagtcacctgggttactcgtggctcccccaagcggttatcagatttcactgccctagtgtgaggctgcaccccatgttccccaagtaggatatgcttggggtagccacagtagctctgtctcaggagtgagcctgctgtgacctaaagcttcagaatcagctcaaggattttcctggaatggggagcaggccaggttcctccaggctcaaccacctgttatagtagggtcttgttttgaggttttctggttgggcaaggcccaggcttcatcgtggagcatttgggagatgagagatggcttccgggactacatagatggctcatggagaaagagtgcttgtggaaacatgaagcctgtttcatgaaaacagggtacctctaaatgcccataaccccaacatttgggagcagagacatcttgagagctctctggctggccagcctagctaagatggcaaagcatctgattcagtgagactctgtctcaaaggaataagatgcggggttggtagaggacacctgatatccgtctctccttctgcatacactcttacacacctgcatgcaatatactatgctcgttaaaaaaaaaaaaaagtgacttaagagagaaacttgattctgctttatctctaacctcctgtcagtaatcgtcattcctcccgggatcagagtctggctggccaatcatacagcatctcctatacctaccccccgcccccctttatggaagaccctatgggccaggctcactgggttctatcttctacaaatctttctttctaggagccacgtgtgaggtggtgttggccccatgtgctaccagcccctgcaaaaacagcggggtatgcaaggagtctgaagactatgagagtttttcctgtgtctgtcccacaggctggcaaggtgaggcttgcctggtcccaccaggctgggacaaggatggtggatgggaagtcaggggccctggccagcctgtggggcagtctcgagaaaggagcccatcaatgctgagctacctgctctgggaagctctgggaagctctgggaagctctgggagcaggagatggtccttcccattccaactccatatccttctgttgcccagaggtcaggggagaagcactggagataaacagaccagctaggacagaggctcagagggtgggggcaggtaaccaaatgagtttttgtcttcacaggtcaaacctgcgaggttgacatcaatgagtgtgtgaaaagcccatgtcgccatggggcctcctgccagaacaccaatggcagctaccgctgcctctgccaggccggctatacaggtcgcaactgtgagagtgacatcgatgactgccgccccagtaagtggtacccagctctgtccatcctatgtttcggtgcctctgttcctaagcacacatgacagggagctgctgagagtctgaggtggaaaatagccctggtgcccggcagtcatgaaggactgtggatagctgtgccctcagcttagtccacttgcctgtgccttaaaaagagacaggccagaggctagacaggccaggaggaggctgttgagcatcagtgtgtgcttctcacgggctttgctgctagatttcccagcccaattgagtgatatggagcagaggcaccaggcacttcaaaatgatggcatggggcctagttgtattcaaccttgacactcggcccttgtcaggacccattgagttgtgtagggctttagagatgccctgcatcctgagtcaaagctaaaggcagagagagattgagggaggttctgcctggcaccatcagtgtgtgtgtaggggaatgggcttccctatgactgccttgggcctgagggaaaaagtgtatgcggagcagattccaggctcagtgctgggatgggcccctgttgactactgtcatcaaggcttgctgtgagcacttgccaccccataccaccttctcagcatcaggtccccgaagcatggccagtggccacctaaggctcatctttctgtccctccagacccgtgtcacaatgggggttcctgcaccgatggcatcaacacagccttctgcgactgcctgcccggcttccagggtgccttctgtgaggaggacatcaatgaatgtgccagcaatccctgccaaaatggtgccaattgcactgactgtgtggacagctacacatgtacctgccccgtgggcttcaatggcatccactgcgagaacaacacacctgactgtactgagaggtgggtcccagcctcagctgagacagggaaagaaatggactgtggaagacacaaagtcttgacagcatggcatctcaagctggtgtcttgcccagacccagtgggcatacagcactaattgaactgaatccagcgttgttcattatgttgcagtatccctcctaaaggggcctttgtgacctccagtgacttagaacaaggaagtttgtgcagaggaattggggaactagcctcctatcaaacaagagctttgtaatctgtcttagttccccttttgccctggttgccaggaagcttagagttaaatcaatctcaagcctggtttgtgatgcgcttcctatagtgttcctattttgcccttgattttgtttttctcaaccaccacgtgtctatatgctataaaatctctgctcgtgatttgggtattgtggccaggtaggcatggagttgtctctcctggcaaggaccttagggaactcctcactcttccctgcttctcatctgcctctagctcctgcttcaatggtggtacctgtgtggatggtatcaactccttcacctgtctgtgtccacctggcttcacgggcagctactgtcagtatgatgtcaatgagtgtgattcacggccctgtctgcacggtggtacctgccaagacagctatggtacttataagtgtacctgcccacagggctacactggtctcaactgccaggtgagctgaggttacagggtatgacccagaaggcctagggctctccagtgcccattgcccagccctgggccacactaccttcagagggccagggacacagaagcagagaggctccctggtgtcatcattggttgatgagccagaatgaacccacatcctctgggaaaatgccaagttgggtgcttctgagggagacaggtgggcatgggtgccagccaggctcttctgtggagtgcattatgtggccatctgtctgaagcagcctggggcagtgctcacttctggtggaggatgtccaaggggaggtagccagtgggttgtggagagccttgaaagagagcaaggaagacgtggagcccaggcctatgttgttcggagggcgggcagtgtttgtgagtcctgtgcctgggatttcttaggtgatattctttctgagatggtgggggtgggggtggggaagtcagagcataaaatgccttattccagtggcgctcagcctgtgggtcatgaccccaataggggtcatatatcagatatcctgcatatttttgctacatgacagtagcaaaattacagttatgaagaagcaatgaaataattttatggttggaggtcaccacaacacgaggaactatattaaaagactgcagcattaggaaggctgagaactgctgtgcttctcagagccagccaggaccagggcaggagggtgccctagcagtcagagttggtcagggagaagctaaccagcgcctgtctcctcagaaccttgtgcgctggtgcgactcggctccctgcaagaatggtggcaggtgctggcagaccaacacgcagtaccactgtgagtgccgcagcggctggactggcgtcaactgcgacgtgctcagtgtgtcctgtgaggtggctgcacagaagcgaggtaaccaaccggccgggcccacctgtccttgctcaggctcagcttaggccaggagtgccccggtgcctgccaggtcaggtgacaatgggcagtagtcccgagaatcggagcccaggcctcagctccttcccgtcttgtccccacaggcattgacgtcactctcctgtgccagcatggagggctctgtgtggatgagggagataaacattactgccactgccaggcaggctacacgggcagctactgtgaggacgaggtggacgagtgctcacctaacccctgccagaatggagctacctgcactgactatctcggcggcttttcctgcaaggtgtgggccgtcatggggtggcggggagggtatcagcgtgagtgttgctgcaggggagggcttttgactgggagctagtgcatcatggcagactgagcacatacctgtgcaggatccggtcacattacagatgtgctgaaggaggagaactatgccaagcagtggcttagggcacccctttcctatatggtttcatggtacctaatacctgctccaagacctcatccctgggggaccaggtgttgccccacacacacacaccttggacacttattttaacttactggggtctactgggtggagccctcgctgcagggtgggacagtgtagtctaactgggtatatggcctgcatggcaagtggaggacatgataccacaaccccagctaagctgtgacctgtgccatttctacagtgtgtggctggctaccatgggtctaactgctccgaggagatcaacgagtgcctgtcccagccctgccagaatgggggtacctgcattgatctgaccaactcctacaagtgttcctgcccccgggggacacagggtaagggtagggacctggatgatgggcaggatccagccagagatcactcaggtgattgagagctgaccacggaataggaatctcagaagggaggtgggctccagtggcactgtgctgcctcccccgggccccaggtcctaactgatttctggactgggctgcacaggacagagcacagtcagcatcatccgacggtgtctctggtcactctgcaggtgtacactgtgagatcaatgttgatgactgccatcccccccttgaccctgcctcccgaagccccaagtgcttcaacaatggcacctgtgtggaccaggtgggtggctatacctgcacctgcccaccaggcttcgtcggggagcggtgtgagggtgatgtcaatgaatgtctctccaacccctgtgacccacgtggcacccagaactgtgtgcagcgtgttaatgacttccactgcgagtgccgggctggccacactggtgcgtgccttgggcaggtgggtcgaacgggtgggtgggcagggtcaacagggatggctccttactgtcccttcttcacacaggacgccgctgtgagtcagtcatcaatggctgcaggggcaaaccttgcaagaatgggggtgtctgtgccgtggcctccaacaccgcccgtggattcatctgtaggtgccctgcggtaggtgtccctggccctgtgcggctgcaagggtgccaggtctgagggtgcctgaaccctgaccgactcttatggtggatctgtcctccacccaccctcactgtgaatagtcagcctgaagacctctagcagaggctagggtccaagccacatgcttcctcgtgtccattccccagctcgtttataaaacccgagcgggcacgatccatacatgccttgctcccagtgctctgcagcctcaggctgaaagattgccttgtatttgaggtaccttaggcttcacaacaagaccctgtttaaaaagtttatttcctgctgtgctatgttgggaacctcacacatgctgggcaagtgttttgccactgtgtcttagcccaattttttaaatagatgtttattttagagcggttttaggtttgcatgagaacttagcaagagggccaggtccccaccctgcaggccgttccctatgtttgctgccttgcgtggaaggtgttgagctggcactaatatgcagtatttgctcttgggtgttgacatccagggatctgtacacatacaatgtaccagcatcagccttgggtttcatggctctaaaaactcctagggttctccccattcacctatccctccagtttgaagcccttggcaaccctgaccatcctatggtgagatgtttcaagggtcttgttattggggcaaggccatagacacctttcacaggccacagactggggccaggtctttgctggggtgtgcatggtgtccctgattgaatgcaccatcctctctccaccacagggcttcgagggtgccacatgtgagaatgatgcccgcacttgtggcagcttacgctgcctcaacggtggtacatgcatctcgggcccacgtagtcccacctgcctatgcctgggatccttcaccggccctgagtgccagttcccagccagcagcccctgtgtgggtagcaacccctgctacaatcagggcacctgtgagcccacatccgagaaccctttctaccgctgtctatgccctgccaaattcaacgggctactgtgccacatcctggactacagcttcacaggtggcgctgggcgcgacattcccccaccgcagattgaggaggcctgtgagctgcctgagtgccaggtggatgcaggcaataaggtctgcaacctgcagtgtaataatcacgcatgtggctgggatggtggcgactgctccctcaacttcaatgacccctggaagaactgcacgcagtctctacagtgctggaagtattttagcgacggccactgtgacagccagtgcaactcggccggctgcctctttgatggcttcgactgccagctcaccgagggacagtgcaagtaagtaaggctgagtttctttagagtcccagggctcaggatgctacgggaggacctaaccaaacaccaggctcctgaagccaatgtctatccctgcccattgcgagtcgccaagcacatttcccagatctggcctattcaaggtatgggtttgaggtccacaggctgggatgggactgagtgcatcctatacctcctcagccccctgtatgaccagtactgcaaggaccacttcagtgatggccactgcgaccagggctgtaacagtgccgaatgtgagtgggatggcctagactgtgctgagcatgtacccgagcggctggcagccggcaccctggtgctggtggtgctgcttccacccgaccagctacggaacaactccttccactttctgcgggagctcagccacgtgctgcacaccaacgtggtcttcaagcgtgatgcgcaaggccagcagatgatcttcccgtactatggccacgaggaagagctgcgcaagcacccaatcaagcgctctacagtgggttgggccacctcttcactgcttcctggtaccagtggtgggcgccagcgcagggagctggaccccatggacatccgtgggtgagtgctccagctcctgctgttgtgggctgtttcccagtgtgtccctgggttctctaaccagcttaaccctggaggtgtaacctcaggggaggtagtattcaccttattttatagtcagaaagcacctgggatgaagagggcatccctctgatgaggacttggcaggcctcagggtttgcccagatgtgattttcaggccccactgtgtaccaggtgttggagaccaagctgattaaagcctccagggtgtcccctggggctaagtcatcctagaccaatcctgaccctcagtcactacagcccttatccctactacagaggaggcagtgaggggtacagaagggcactgttgctgagcctggaaggctgaggagccgagggaggcacaaataagagcatctcctggatgctgcacagagccatctggggatgggcagggaagcaccagccaggcatttggaggttccaggagccttcgctgttgggcatctgcctggtggcacctcagtgtctcctgaccccagtggttcctggtcctggttttcttgtcgtgggactgtggtgaaggtcagaaattaattgtttcctggaggctgttagaatcctgtttctgagaggccagtgactgagagttggtgacttggctggcatgagagagctgactctctggcatctgagcctgctgtcacctcaagctacaccatagggagtcacaactgcatccttgcagttctgtggggccccaggcactgctctcaagagggcattggatgcctaaagactattctttgaagtaaggaaaaggggtgctgtgcacctaaggggcaaggctagacagtggaatgacccccgctgagtgctaaacactggggcagcagggagagtgtcccattgcggggctgtcgtctgataagccctgtgggtcagggtgatgggctagggagtcagagctggtgtgtaggcagtgtactggggtgtatctaatctcactgtgccatgtgtgttctcagctccattgtctacctggagatcgacaaccggcaatgtgtgcagtcatcctcgcagtgcttccagagtgccaccgatgtggctgccttcctaggtgctcttgcgtcacttggcagcctcaatattccttacaagattgaggccgtgaagagtgagtaatcaggggctggagggatggctcggtggttaagagcactggctgctcttgcagaggacaagggttcaaatcccagcacccacgcagcatcttataactatgtgttactctaattccagggcatccaacactttctgacctctgcaggcaccaggcatgcacagggtcctgacgtacatgcaggcaaaacacccatacacattacatattttttaaatgagttccctaccccgaccagccctgcctcttcagggatgggttcattgggtggcgggtcacaggcaggcggtctctcactccttgtgccagctgccattcccagctcaggaagtgcttttctggaatttttttccaaggccttccctccctgtggctagtgggagccgtaagtaaaagctgtcccctaagatgtatacatataccagaaagtatggaggagtctttcttctctcctcattctttacccctgatttttctttgttggatattatttcaaaatcattactagagtttttttgtgtgtgttattttttttaagagagagagagaattgatcggtgtcatgtgaagtgttgaagtttgtatcttgaaaatccccctaaatcctttgtcttaacagctcaatgcgagcgcagtgatttgaagttcgctaatcctccttctcgaaaggggagaagtgagcactgtctccagacagatcagctggtgcaggagagaatttagcgatagtttgcaattctgattaatcacgtagaaaatgaccttattttggggggtgggatggaggagagtgggtgaggaggcaccggccgtggagccagtcctccgccccccgccagcccacagcatcaccacgcctgacgaggggtgcttgcctgccgcccctgcccgcaggtgagccggtggagcctccgctgccctcgcagctgcacctcatgtacgtggcagcggccgccttcgtgctcctgttctttgtgggctgtggggtgctgctgtcccgcaagcgccggcggcagcatggccagctctggttccctgagggtttcaaagtgtcagaggccagcaagaagaagcggagagagcccctcggcgaggactcagtcggcctcaagtgagtggacactgctcccactgtgtgtgggtgagtgagtggcagggttggtgggggtgcttagctccagaaggcccatgggcccatccatccctgtccgttaccctaagcccttctgcatgtagaggatgcccatatgagctgtggcttcagggcatctcctggagtacctgctcagtctccctacccccatacccaggcccctgaagaatgcctcagatggtgctctgatggacgacaatcagaacgagtggggagacgaagacctggagaccaagaagttccgggtgagtcccgcaggctcccaagccccccctgggtggcacctcctgccttggccccaagtgatgaggctctgcttactctgtccacactcagtttgaggagccagtagttctccctgacctgagtgatcagactgaccacaggcagtggacccagcagcacctggacgctgctgacctgcgcatgtctgccatggccccaacaccgcctcagggggaggtggatgctgactgcatggatgtcaatgttcgaggaccaggtaaggccactggagacacatgcacacattccctagcatagacttaagaggccagtaggacttgaggagggctgggtcactgaagggctctgccagagcagcatcctgccctgagctgatcgtctggctcctcctgcccacacagtatactttttcatgaaatgctgctttgcaatagtcaaagtgttaatttttttttttttttttggtctcagtttttagtatgctgggattataggtgtgtccccatgcccagctaaagtgttgacttttaaaattatatgcatataggtgtatataaagatatcttttattttatgtgcatggttctgcctacatatatgtctgtgtagtgtttagatacccagtgcctgtggggagcctgaagaggccattggatcccctgaagctgcagttacagatggtagtgagcagctatatgggtactagggattgaactcaggtcctctggaagagaagccagtgctcttaaccactgagccatctctgcagcccttattttatgttttaaagcatttcttcatttgagtgtaaggggcacacatgtgccatagtacacacgtggaggtcagaggactacttgtatgagtgtgggttctctccttctaccatgttggtcccagagtgccttccagggaggcagcactgcatccctggggacttcatccggggtcccttaaactgcaggactgcctgccagggctatggttgaatgttgaccctccctgaggctgacaccatccttcccacacctacccttgtttctgtcctctctgcagatggcttcacacccctcatgattgcctcctgcagtggagggggccttgagacaggcaacagtgaagaagaagaagatgcacctgctgtcatctctgacttcatctaccagggcgccagcttgcacaaccagacagaccgcaccggggagaccgccttgcacttggctgcccgatactctcgttcagatgctgcaaagcgcttgctggaggccagtgcagatgccaacatccaggacaacatgggccgtactccgttacatgcagcagtttctgcagatgctcagggtgtcttccaggtacgcagcactgcatccttggagccagtgacctcatcaggtctgactggcatggaccctgcaatctctaattccaagtgtgactgggcagggaaacttggcacctccacactgcattttgaaggaagtccaggtacaaagggcatcaagtcccacctgtgttctctgagcaggctggctgaaggtggtcttgcggaacctacagggtgaggcagggcctccttactctcagtaaaaccctcccaatctcaaggctatggccttgacttgaggtctccacctccgtgctaaaacctttgcagactaaccctaccccattcagctgtggctgcaggcatagcccatggcggcagaaagagagctttagaggctgctggtcctggcctgcaaagctatctcctggctttgcctagaagcctggagccagcctgggtggatttaaggatttagctgcctgggtctgcagggaccaaccctagtagttgctcctgcatgttgccagccagtgacccctgctaccagacctgtcctctaggcggccctggagcaaactccaatggggaatagaccaggcatcaaaaagcttgtcatttaatcatttcttaacttgaaccacactttgtcggtctgtagaagaaattaaacaagacagggcaatgtacaccttttatcccagcactctagaatctgagaggattgtgagcatgaggctagcctggtcttcatagaaagaccctatttcaaaatagcaaagagaggttgagaccagccacaggttatgttgactgcctggtgtacagctctccacatggcctgccttgcttgcatagacagatgtgtgtacgttttgtaggaatccaggcagtgctgtgaatccttacccaggtcaccaacccactccctcctctcaccttaacagttccaagtacggctatgggccatgagcgggattcctagcctggttactctcccctctctcccccatgctatgcagtttgatttcctcaacctggaggtagttctggcaaccataaccaaaagatgaggtcccagtagatcccccactgtcactagggactgggtaagagccccagctcttgcacatggaatgtagctcctgccttcctcaggggctcagctgagcccagtccaggcattggtttctggagatacaggcttgcatttagatcaccctgcctgaacccatccctgccttccagatcctgctccggaacagggccacagatctggatgcccgaatgcatgatggcacaactccactgatcctggctgcgcgcctggccgtggagggcatgctggaggacctcatcaactcacatgctgacgtcaatgccgtggatgacctaggtaggcccgagctacagcccagctaccgaggacatcagccagtgcctggtctgctcagccccaacccactctctcctctctttgcttcctttccaggcaagtcggctttgcattgggcggccgcggtgaacaatgtggatgctgctgttgtgctcctgaagaacggagccaacaaggacatgcagaacaacaaggtaagcagacgggctgcttaaccgcaggcgcatgatggggactccggggcacccatacgttgaccacttagaggtttaagagtgtctgggacaacagcagcctaaaataacccgtgctcttgctggagaggagctgaggcgtaagcagctgtcccatgtcacggttacttgagccttgccttctgtccccttctgtccctggtggctgtggtgaccctaggggttcaggattggccaaggggcagggatggggtggccctgtctcttaaggcctgcaaggcttctggcttggtccaccactaccatgctccctcctttgggataagaaaactgctgagctgggctgcgtgtctccacctcgcctcccagtgtctctgtttgtgcagggctagttgcttcatcaggactctgcttagttgctcacagggcagagtttgtgcctcccttaccagctccactgcaggctgggaaatggagcaggagtcaggtacctggagttgctgttgggcacaggttctccacagtccagggtgggccagtggttatagagaatccaagcctgatagacattctgttgtggtgtatgattatgtctgctggacagagcagacctggaaggagctgagatgccctagccactggtgaccctttggcatggtagtaccttccccatggccattcacttgccttaaaggtccctgagtcccaggattgcagtacttgtgcctgcattttggggaggaaagcaaagggcacacagttacattctgttttcggcagtctgactccacacaggggaagaagccctatgtatttatcccacagatctctggggtgtgaggtgttaaatctaggttctctaaaaaaagaactcgggaccagccatgtgtgcgtgctagcaccgagaagctgaggcaggacgatactgagttccaagtacggctgtgggccctgagtgagattcctagcaacataggaaggccccactataaatactctctgagcctggtggtctaggatgcttgggtctagatagatctctccagataagagaagagaaagaggcagcacctgcttccctagcccctccccccaggccatccatcatcaatgactcagcaaattctacacctgcccgctccctcatgtacctcctgtccgtgtcctacaggaggagactcccctgttcctggccgcccgtgagggcagctatgagactgccaaagtgttgctggaccactttgccaaccgggacatcacggatcacatggaccgattgccgcgggacatcgcacaggagcgtatgcaccacgatatcgtgcggcttttggatgagtacaacctggtgcgcagcccacagctgcatggcactgccctgggtggcacacccactctgtctcccacactctgctcgcccaatggctacctgggcaatctcaagtctgccacacagggcaagaaggcccgcaagcccagcaccaaagggctggcttgtggtagcaaggaagctaaggacctcaaggcacggaggaagaagtcccaggatggcaagggctgcctgttggacagctcgagcatgctgtcgcctgtggactccctcgagtcaccccatggctacttgtcagatgtggcctcgccacccctcctcccctccccattccagcagtctccatccatgcctctcagccacctgcctggtatgcctgacactcacctgggcatcagccacttgaatgtggcagccaagcctgagatggcagcactggctggaggtagccggttggcctttgagccacccccgccacgcctctcccacctgcctgtagcctccagtgccagcacagtgctgagtaccaatggcacgggggctatgaatttcaccgtgggtgcaccggcaagcttgaatggccagtgtgagtggcttccccggctccagaatggcatggtgcccagccagtacaacccactacggccgggtgtgacgccgggcacactgagcacacaggcagctggcctccagcatagcatgatggggccactacacagcagcctctccaccaataccttgtccccgattatttaccagggcctgcccaacacacggctggcaacacagcctcacctggtgcagacccagcaggtgcagccacagaacttacagctccagcctcagaacctgcagccaccatcacagccacacctcagtgtgagctcggcagccaatgggcacctgggccggagcttcttgagtggggagcccagtcaggcagatgtacaaccgctgggccccagcagtctgcctgtgcacaccattctgccccaggaaagccaggccctgcccacatcactgccatcctccatggtcccacccatgaccactacccagttcctgacccctccttcccagcacagttactcctcctcccctgtggacaacacccccagccaccagctgcaggtgccagagcaccccttcctcaccccatcccctgagtcccctgaccagtggtccagctcctccccgcattccaacatctctgattggtccgagggcatctccagcccgcccaccaccatgccgtcccagatcacccacattccagaggcatttaaataaacagagatgtgggatgcaggaccccagcttccgttcccaagccctgttgggagtcctttccagtgcttcaggatgctggggcgaccaaaggagccttttaaaaaatgtttttatacaaaataagaggacaagaatttccatttttttttttagtatttatttatgtacttttattttccacagaaacactgcctttttatttatatgtattgttttctatggcactagggaaaaacatatctgttccaagaaaataaactagttctcagagccttgattttcctggtcagggtgaagttccctgtgtgtctgtaaaatatgaacaaggattcatgatttgtaaatgctgtttatttattgattgcttctttccaaaatcgaaaagaaagaaaaaagaacgtgacaggagaagggaagctggaaactgccatggccagaattgcccctcccccacactcactgcccctccccccagcgtcacctgggatttgcagatgtgtttagaaacacgcccagaccttgaaccttgggttcatggattagttttgtatctaaaacaggaaacaagtcagatgatgtggtttgtacactttctgtaaccaccagtgtggacttgaagaagtgtcctcagcatgtgcagagtctactacccagtaccagtcgtgagtctgcaggctccagtgttctgtagtagtgtttatgggccttgggagtacttctcccctgccctgccccactgtccccttcctgacaacttgagccagtaagccatgcagggtgtggtgcctcctagagaaaacactgcctggactgttctgtgcatccctccaaacagcatcatccaaatccaactgaggacagacggactgtcccggcctgggcctgggctcctaacacctgactgccaaagggctccaatgtgcattgtggactcgccagagtagcctgcattgagactccaagaaaacagaagctatgtggcctctgatccccaaactggcctgggtggggacatgccttgagtgtgctggaatgtgggtggagcctgcttctgggccacccctcctggttcagggctgtgctcacagcagattcttgcagtatcaagtatacgcctgtggcagaataagtatctgtaaatacatgtttaaagatggattttgtttaaaaaatctaaaggaacaagtgtgtcgtgtgtcaagctgatgaggactgtcagactgtggcttagctcagtgtgacccagaccttgtgacctgtagctgccgaaccagtagctcctaagagcacaacccaggatggcccatctgctgcccaccaagtccctttccagccactgtgtgctgggggctttcgggggcagttgcccacctcctcagggcagctctttctggccttttggggggcagtgtctgtgccatgcctaatagatatgaccagacgcatcctaagatgttgattcttactgtgttgtataaaataaagtgtagtttacaaaaaaaagaaacgtaaaaaaaaaaaactacatgcaaaactgtaggtaatgaaaatgatgtatttttttcatctttttttgttaactaatttgcaataaaaatgatactgatggttgtccacattttgctaaacttggagtgtggtttggttcactttttggggagtgtgacagagaaagggccacccagcactgaaataaccaaatccaaaccctctcttacacagaaatacagaggttgccataaggacacaccattttcagaagctgcacagcgcagggcatcaaggtgggaagacagtttccaaaagagttgatgcagtcctctcagggatgtggatctgattgatgccagctgtattcctgtgagcagcagaggagtgaaggcaccttatgttgtcatagatgactatcctctgagcccagtaacccccaacctcttcaaattcagccatgccttgcaaaaggtcatcccagctgtgcttgttgactgcttatagaccccctcaaagagttgggaaggtcatgggactcaaaggacccttgcctgatgatccagtcactttgttgtatgcagtcctgccctaattgtgcatgacctcagggaggtactagagtatatagtctgggaagactagtggagagactccatctatgtggctgtgaggaaagccttatccctgctgggtaaatgttgtattaatattcatttaataaaggctgggcgtggtggcacacgcctttaatcctagcactcaggaggcagaggcaggtggatttatgagttcgaggccagcctggtctacagagtgagttccaggacagccagggctatacagagaaaccctgtctcgaaaaaccaaaaaaaaaaaaaaaaaaaaaaaaaaaaaattcatttaataaatcctggcagcaggtcactatccaactcaatggtttatgaaagacacacaacctttctttatattttattatgtcttattcagcacaatagctgggtagctgcctagcctccatattgctaagactctgtctccccattctgaattcctgcttactaattctatgttctatcgtggctgatctagaccaagttgggcagccttctaggccatgctctcccagctccttcaggtggtagccttgcctctctgtcctgcactcttcccaggcatggcatctctcctctccccaactctcccttctcccactgcctcaagtctcaagcccaggagtcctaaacggtccaccttgtctgtcctccccagctactggctattggtatctttatttaccaatcagaacccactggggacaggttcccaaaagctatgtgtagaccttcctgtgcagttcgggggaacattaacatttgtaatacaaacagctacaagtaaagagttccaatgtggactcagtaagtaaccctttacctatgttctgctcttgtcagcgctgcaaatccattggtgccctagtcagctttggtgcctaggaccttaggaggagggttaagtgttgtctcttcctgggaaggaattttagcaacactcatctagtccgagagcccagcaggtacaaaggcatcttagccctaagaagaaatcataatagcacaggtgtggatctcccttggcctgctgtactggctagttttgtgtcaacttgacacagctggagttatcacaaagaaaggagtttcagttggggaaatgcctccacgagatccagctgtaaggcattttctcttagtgatcaaggggggaagggccctttgtgggtggtaccatctctgggctggtagtcttgggttctataagagagcaagctgagcaagccaggggaaccaagccagtaaagaacatccctccatggcctctgcatcagttcctgctccctgacctgcttgagttccagtcctgacttccttggtgatgaacagcagtatggaagtgtaagccgaataaaccctttcctccccaacttgtttcttgctcatgatgtttgtgcaggaatagaaaccctgactaagacacctgcctaggcctctccatttggcccacaccttggagcacagcaggagtctctaaccaaagtgacaatggggaatgtgatgccctctctgagcctgacatctgaggacaagtgtgaatccatcaagttcagatgtcttgccccggctcagtgttgcacactgtgaaagcggagggggcccaggggcccagaaggggtgctcacacacagaattgtgataacttgtctcattcttgccctcaaggggaaggtcggagcctgaattctgcccggagaactagcatctccaaaattccatccggaatggaaatgtcagctcggaaagggcttagcaggctcatatgcctgggtgttctctagagcatcatccacaatggcatgtgcagcccagggttcacaactgatggctggaccactgagaacacatctggactgggttcggggtgaaaaacattgatgtttgcagatcaaagcaagggcctacccatgtgggcaaatcttctccagtgagagaccaaacaacaaaaggtcagggaagaggggatggatcctgcctactgcggcagaacatgaatcctctcccctccaggctcccacggaaagattgcctgttcttgggtctccagcttgccaggtacagctctggggacttgccaaccccacaacctctctttgtatctaccctagtaaacattcagtggagtatttttcagccattagaaggaacaaagctctgagacctactaacatgtgggtgagctgcaggaggacacagggctcgtgaaagacatctcaaaaatgaccacatgatttcatctttatgaaatgtcctcagtaagtaaagccacaaagacagagaacagagtggccattcctgggtccagggaaatgggtatgactgacaatgcctatacatttgactttgcatggatagtccagcactgtgtacgtctaaggcagaaggctgcatggcactgtgaaggtcccagacccgtcaatgctagaattccacaatctgtgagtctactaaaactagcaaaaaaaaaaaaaaaaaaaaaaaaaaaaaaaaaaaatccaagcaaaatgggaactttcagaaatttgtcccatggacacaacaagttctcttttattttgtgacaggatcttgctgggtatcccaggttggcctcaatctcaccatcctcctgcctcaatctcccaagtgttgggattctaggtgtgtaccacgccacccacttaaacctagtactcttaaggagcatctatctgcccctaaaagccactggaaataaataaaacatgtaaaacaatatttttaaagggctaaagatgtagcctagtagtagagggtttgtttactctgtgcaaggctctggatttcatccccaggaccaaataaagtaatcaataaattggcttgagacaaccttcaataaattccttgttctatgaacctgagctcctcattttgagtcatgtaaaaaagttgggtatgatcatgtgctgtaatcccagcatctgtgagatggggaggtagagatcggtagagtcctacttagcttttgtctaatcagtgagtcgcaggtcccagtgagagaccttgtctcaaaaactaaaaacaaaaaggccgaggactggggagatggctcagatagtaaaaattcctactgcactagcacaaagacctgagtttggaatctccagcatccacatgctgtcctggaatgaccatacatctgtaatcctgtgctggggtggggagggagacaagatcctggagcaccacttgcctagccaatgatcaatcaagcactaggtccagtgagagagaccctgccccaaaaaccaggatggagtcaggcattgtggcacatgtttaaccccaacattcaggagacagaggcccagggctaaaatagtctctgtctcaaaaacaaactaaaaaaccaagctgagaatgagaatgataccttctggcttccacatgccatatatacatatacatgctcacacgcacaggcacacacatatgcacagtgtaaggactaaattgggcacccagcagctagacagcccagagagaaaatagagtcttgcagcctcagccttcctttgtttaggggggattacaggacagtgggccctgctgtctctcaacagaaatactccaggaccaaatcccaagcagacagaggtatggagatgagctctgtgtcatacacacactgaagatggtcatatacagacatgggagcagaggcaactgagtggtcttggagcaacttgccctgtggtacccggtcacagacctccaggacaaggaaattcctgtgaaatccaactggtgtggggctgtttacacagcaacctggatagattgatccagtctcgggctgaggtgatgtcttggatgccgaaatctctcagggacacaggccagttcagttccctaggtactgcctttcccccacaatgaaatgccatctgtgctggctagctgtaacacatcaacttgacacacaaactacagagttatctgagaggaagaaaccataattgagaaaatgccactgtaagatctggctgtaagacattttcttaattagtgattgatggaggagggccagcttatggtcctgagttctataagaaagtaggctgagcaagccatgggaaacaagccaataagcagcacccctccatgacctctgtctgtatcagcttctgcctctaggatcctgccctgagttcctgtcctgactttcttcagtgatgaacagtgctgtcaaagtgtaagcctaagaactcctttcccctccaacttgttttttggtcgttgtttcatcacagcaataaaaaccttaactaagacaccaccactccccagggatctgccatcttgtaatgtttttgtttgttttcaatttagaagaatagttattatgtatatactactagagggcagtgagttaggcagtagtgagtaagcaggggcacactacgtcctctggctggctgaaccttgtgatccttctgcctcagcctcctgagttctaggattgcaggtatgccccaccaggcttgactttaagtcctacttttcaacattcaagtatgtaagtagttccagacaagtatggtaaatccaacactctagaggctgaggcaggaggactgccataagttcaaggccagcctgagttatatagctaacttctgtttcaaaaataacaaaagcagatataaataacccgagaacagcctggtggtggtgttgcacacccttaatcccagcactcaggaggcaggcggaggtaaatttcttgagttccaggccagcctggtctacagagtgagtttcaggacagccagggctacaaggagaaaccctgtctcaaaaaactgaaaccaaaccaaatagcaacaaaaacaaacccaagaactagttctcttcctgtcccaagtgtccttcgctccactgtctgtgtatatcttcagtatgagagagaagggcttccttagcctcctggggtcattcagagaagcccattccaatagaaataagacggaaaccacataggtcattcaaagtacttcataacccttaaaaaggtcaaaggagcaggtgaatttatttcaatactacatcttggttcgtccaatgaaaccacagttaccacttaactagcagtcaacacaagcgaagtatgaaaaggacagagttgacattctttgtattattatttgtatttatttgcttatgtatatgtgtgctaacacatgccatacatgtagaggtcagaggacaagtgatgagagccagtctctccctctaccatgtgggtcctagggactgaacctgggttgtcctccttggcagcaggcacccttacccactgtgccagctcacctgcattatcaccatctgcactggccatgctgaaggtgcttagaggccacacatggtcaaaatgtcatcccagacaggctaatctccaccagcacagataaacaacccatggagccagatgtagtactgggagcactggggggcgaaggggaggacggtaaaggcaggaggttcaggagttctaagccagatcctgtctataaagatgtaagcaaaggaataaagaaggtgaggggagagactgctatgctggtgttgtttcttgtcaaaggaggcaccaaatgtggctctgcattgctttgtccagcacaaagagggacccaagggtattagtgccataaacccagccaaagcagcagggttatgcctacaatcaaaagtgatggagtgctgctgtccttctgagactccgggaaccagccagccatgagtcttgcaaagtttgctatcagggacactctatggggagatttttactatgtgactccagaccccaccctgtggagctgtggagacccaggccaatcctcagctgcatacgagttaggaaacagggctcttttactacagtatcctcaagcccgactgagctatgtgtactgtggatttcgaaaggtttgtgtggagcttctccagagaatccctctgttttgaagatcaaggacagggatgctgctctctccacctgcactttaaagatgatgtggtcctgtcctaattcctgaccaccctcacgggtggtgttctcatggactacctggcagctgtgggatagaaggtccctagagtgtcctcctgtgtgaggggtgacctccaaggtctatgtgtggatgctttggccatctgtgtagaactcacttctggtaaggacccagaaatagcatggctattgttatcacaatggattttaagaacattccttagcagccaagcccagcatacacagtcactggtcaccacaaactcattgagagatggtgtcttagttagggttttactactgtgaacagatattatgagcaaggcaactcttttttttttaaagatttatttattattatatgtaaatacactgtagctgtcttcagacattccatagtagggcatcagatctcattgtggatggttgtgaactaccatgtggttgctgggatttgaactcagtacctttggaagagcagtcagtgctcttacccgctgagccatctcactagccctgatcaaggcaactcttataaaaacaacatttaattggggctggcttacaggttctgaggttcagtccattatcatcaaggcaggaacatggcagcattcaggcagacatggtacagaaggagctgagagttctacaacttcatctgaaggccactaggagaaggccactgacttccaggcagctaggacaagggtattaaggcccacaaccacagtgacacacccactccaaaaaggtcacacctcctaataatgccactccctgggctgagcatatataaaccatcacagatggccaagaatggttgcttcaatgcttttatgtgcacataccacctagagtgttccacaaagttcagggttcagagctttcacacaactttgacctcaaggcttatttttagattctagtgcttgtgagatccattctctacaacaccatgctatttctatgactatttcaaatacaagactgtgttatgccgggtgtggtggtacatgcctttaatcccagcactcaggaggcagagtcagccggatttctgagttcgaggtcagcctggtctacaaagtgagttccaggacttccagggctacacagagaaaccctgtctcgaaccccgaaccccccctccgccccccaaaaaagacgactgtgttctgtttctcatgagattcttctgcatggggtgagcatgctttctactggagctgtggacactctggcactcagaaacaagtctgacctaagctacttatttactccccatcaatacaatcttcttaagctggaaaagggaaggggagagaaaaggtctctgaccttagcctcagcaggccaggtggaaggggtgacacagaacaaggccctttcctctaccttgaaagcaatgccacaggctcccacaaggttgaggattctgtctctgacctcagagcttggaaatccattgtcttctctgactccaatgtgctcaactcagagagcatttatgcagcacctgctatctttagtaagcccaccccctccagggagtccagaagtaaagacttccctctgcgagggctgctctgtgtgtgtgtgtgtgtgtgtgtgtgtgtgtgtgtgtggttaggggggtctgcagggtatgcaacacctgcacctaactcaagtgagataggatctggaaggagccctcaatggatggataatttgtaggtagatttgtaggtggctctctgcctccctctgctggcagcgttccactagtgtgcctctggcgagcaagagattctccagatggcatttgtgtccatcccaagatattattcatgatgcatacaaggaaactgaatgaaacagttcattcaagttggttcactagatccagagccacatgactcccagatctacgagagaggtcatcttcccccagaaagaatggaagggatctctctagctatgctgtccacaagcacttcaaaatcagaaatgggtgctcagggagaaagaggggtttggcagggcacttttccaggatccctggacacagccagtttggcacatggcaccttttgcacactggggttcctcctggatctatcaaggtccttgttctttccctcctgcctggactcctagggagtccacccatacaatacgaattactacccttgtttcagattcatgccttgctgctatgctggtgctatcagaagcagttgctgccagaaaactcaatctctgcccaagggcttcattaaggtaggctctacatttgctccagaaataccacttgcctgggatgccccaggctaactcaagcaggccaaactgatctgaaaagcccctagaacctcccttacttccaaatatctagcaaatatcccttggcagacctacagacccacaaccaaagatcccttcccttttgatacagaggctctacccagactgtcccaaagagctcctgccctgctttgacaagtgcctctcaagaggcacatctggagcttcctagtgtttgacacctgctccaggacagaggagtagcctaattcccaattgaccctctgtcccaattccagccagcagtgcctggagtacagttgtgcatcacctttgaatgtgcactgggagaccttcctgcactgtctgtgcccctgggttagtgtgatgtcaacattcgccttgtgttttctatttcatccctactccctgcttatcacctatagggtggctctgtgatctaaaaatgtcctctgagacacagaataagccaagccttatgcaggactctggaaacatgaaagagaagccataggccaggaagctgatagtagtgtagttaacaggtattgtacctggaagggaggggcctactgtggattctgagcccctgttatccatgacaattccagaagccttcaggaaagtcttggacaggttctgattaccatctcttttcatgggtgaaaaaatgcaggtgtctaacacccttgaatctctggcttctagaatcttacagtacagttggaccacccaacaaaa

SEQ ID NO: 14 - DNA, 9028 bp, Mus musculus
gcaggggcgtggggcgcagggcgcgggcgctgggcgcgggtgcgagcgcagtgaaggaacgagcccgggtgccttgtagggcccagcgccgctgagagcccagcgccgcccacccgccaggaaagagggcatcagagggtggacgcctgcgggaccgccggtggtgtgcgtcaacgtccgatccccgccggccaccccaagaggccgccgcccgggctgcgggcagctggcgagcaggcatgccacggctcctgacgcccttgctctgcctaacgctgctgcccgcgctcgccgcaagaggcttgagatgctcccagccaagtgggacctgcctgaatggagggaggtgcgaagtggccaacggcactgaagcctgtgtctgcagcggagcctttgtgggccaacgatgccaggactccaatccttgcctcagcacaccgtgtaagaatgctggaacgtgccacgttgtggaccatggtggcactgtggattatgcctgcagctgtcccctgggtttctctgggcccctctgcctgacacctctggacaacgcctgcctggccaacccctgccgcaatgggggcacctgtgacctgctcactctcacagagtacaagtgccgctgcccaccagggtggtcaggaaaatcatgtcagcaggctgacccctgtgcctccaacccctgtgccaatggtggccagtgcctgccctttgagtcttcatacatctgtcgctgcccgcctggcttccatggccccacctgcaggcaagatgttaatgagtgcagccagaaccctgggctgtgccgccatggaggcacctgccacaatgagatcggctcctatcgctgtgcctgccgtgccacccatactggtccccactgtgaactgccctatgtgccctgcagcccctcaccctgccagaatggaggcacctgccgtcctacaggggacaccacccacgagtgtgcctgcttgccaggttttgctggacagaactgtgaagaaaatgtggatgactgtccaggaaacaactgcaagaatgggggtgcctgtgtggacggcgtgaatacctacaattgccgctgcccaccggagtggacgggtcagtactgtacagaggatgtggacgaatgtcagctcatgcccaatgcctgccagaatggcggaacctgccacaacacacacggcggctacaactgtgtgtgtgtcaatgggtggactggcgaggactgcagtgagaacattgatgactgtgccagtgccgcctgtttccagggtgccacttgccacgaccgtgtggcttccttctactgtgaatgtccgcatgggcgcacaggtctgctgtgccacctcaacgatgcgtgcatcagcaacccctgcaacgagggctccaactgtgacaccaaccctgtcaacggcaaagccatctgcacctgcccctcggggtacacagggccagcctgcagccaggacgtggatgagtgtgctctgggtgccaacccttgtgagcacgcaggcaaatgcctcaacacactgggttcttttgagtgccagtgtctacagggctacacgggaccccgctgtgagattgatgttaatgagtgcatctccaacccatgtcagaatgatgccacttgcctggaccagattggggagttccaatgcatatgtatgccaggttatgaaggtgtatactgtgaaatcaacacggatgagtgcgccagcagcccctgtctgcacaatggccactgcatggacaagatcaatgagttccaatgtcagtgccccaaaggcttcaacgggcacctgtgccagtatgatgtggatgagtgtgccagcacaccatgcaagaacggtgccaagtgcctggatgggcccaacacctatacctgcgtgtgtacagaaggttacacagggacccactgcgaagtggacattgacgagtgtgaccctgacccctgccactatggttcctgtaaggatggtgtggccacctttacctgcctgtgccagccaggctacacaggccatcactgtgagaccaacatcaatgagtgccacagccaaccgtgccgccatgggggcacctgccaggaccgtgacaactcctacctctgcttatgcctcaagggaaccacagggcccaactgtgagatcaacctggatgactgcgccagcaacccctgtgactctggcacctgtctggacaagattgatggctacgaatgtgcctgtgaaccaggctacacaggaagcatgtgtaacgtcaacattgacgaatgtgcgggcagcccctgccacaacgggggcacttgtgaggatggcatcgcgggcttcacttgccgctgccccgagggctaccatgaccccacgtgcctgtccgaggtcaacgagtgcaacagtaacccctgcatccacggagcttgccgggatggcctcaatgggtacaagtgtgactgtgcccctgggtggagtggaacaaactgtgacatcaacaacaacgagtgtgagtccaacccttgtgtcaacggtggcacctgcaaggacatgaccagtggctacgtatgcacctgccgagaaggcttcagtggccctaattgccagaccaacatcaacgaatgtgcctccaacccctgcctgaaccaggggacctgcattgatgatgtcgctggatacaagtgcaactgtcctctgccatatacaggagccacgtgtgaggtggtgttggccccatgtgctaccagcccctgcaaaaacagcggggtatgcaaggagtctgaagactatgagagtttttcctgtgtctgtcccacaggctggcaaggtcaaacctgcgaggttgacatcaatgagtgtgtgaaaagcccatgtcgccatggggcctcctgccagaacaccaatggcagctaccgctgcctctgccaggccggctatacaggtcgcaactgtgagagtgacatcgatgactgccgccccaacccgtgtcacaatgggggttcctgcaccgatggcatcaacacagccttctgcgactgcctgcccggcttccagggtgccttctgtgaggaggacatcaatgaatgtgccagcaatccctgccaaaatggtgccaattgcactgactgtgtggacagctacacatgtacctgccccgtgggcttcaatggcatccactgcgagaacaacacacctgactgtactgagagctcctgcttcaatggtggtacctgtgtggatggtatcaactccttcacctgtctgtgtccacctggcttcacgggcagctactgtcagtatgatgtcaatgagtgtgattcacggccctgtctgcacggtggtacctgccaagacagctatggtacttataagtgtacctgcccacagggctacactggtctcaactgccagaaccttgtgcgctggtgcgactcggctccctgcaagaatggtggcaggtgctggcagaccaacacgcagtaccactgtgagtgccgcagcggctggactggcgtcaactgcgacgtgctcagtgtgtcctgtgaggtggctgcacagaagcgaggcattgacgtcactctcctgtgccagcatggagggctctgtgtggatgagggagataaacattactgccactgccaggcaggctacacgggcagctactgtgaggacgaggtggacgagtgctcacctaacccctgccagaatggagctacctgcactgactatctcggcggcttttcctgcaagtgtgtggctggctaccatgggtctaactgctccgaggagatcaacgagtgcctgtcccagccctgccagaatgggggtacctgcattgatctgaccaactcctacaagtgttcctgcccccgggggacacagggtgtacactgtgagatcaatgttgatgactgccatcccccccttgaccctgcctcccgaagccccaagtgcttcaacaatggcacctgtgtggaccaggtgggtggctatacctgcacctgcccaccaggcttcgtcggggagcggtgtgagggtgatgtcaatgaatgtctctccaacccctgtgacccacgtggcacccagaactgtgtgcagcgtgttaatgacttccactgcgagtgccgggctggccacactggacgccgctgtgagtcagtcatcaatggctgcaggggcaaaccttgcaagaatgggggtgtctgtgccgtggcctccaacaccgcccgtggattcatctgtaggtgccctgcgggcttcgagggtgccacatgtgagaatgatgcccgcacttgtggcagcttacgctgcctcaacggtggtacatgcatctcgggcccacgtagtcccacctgcctatgcctgggatccttcaccggccctgagtgccagttcccagccagcagcccctgtgtgggtagcaacccctgctacaatcagggcacctgtgagcccacatccgagaaccctttctaccgctgtctatgccctgccaaattcaacgggctactgtgccacatcctggactacagcttcacaggtggcgctgggcgcgacattcccccaccgcagattgaggaggcctgtgagctgcctgagtgccaggtggatgcaggcaataaggtctgcaacctgcagtgtaataatcacgcatgtggctgggatggtggcgactgctccctcaacttcaatgacccctggaagaactgcacgcagtctctacagtgctggaagtattttagcgacggccactgtgacagccagtgcaactcggccggctgcctctttgatggcttcgactgccagctcaccgagggacagtgcaaccccctgtatgaccagtactgcaaggaccacttcagtgatggccactgcgaccagggctgtaacagtgccgaatgtgagtgggatggcctagactgtgctgagcatgtacccgagcggctggcagccggcaccctggtgctggtggtgctgcttccacccgaccagctacggaacaactccttccactttctgcgggagctcagccacgtgctgcacaccaacgtggtcttcaagcgtgatgcgcaaggccagcagatgatcttcccgtactatggccacgaggaagagctgcgcaagcacccaatcaagcgctctacagtgggttgggccacctcttcactgcttcctggtaccagtggtgggcgccagcgcagggagctggaccccatggacatccgtggctccattgtctacctggagatcgacaaccggcaatgtgtgcagtcatcctcgcagtgcttccagagtgccaccgatgtggctgccttcctaggtgctcttgcgtcacttggcagcctcaatattccttacaagattgaggccgtgaagagtgagccggtggagcctccgctgccctcgcagctgcacctcatgtacgtggcagcggccgccttcgtgctcctgttctttgtgggctgtggggtgctgctgtcccgcaagcgccggcggcagcatggccagctctggttccctgagggtttcaaagtgtcagaggccagcaagaagaagcggagagagcccctcggcgaggactcagtcggcctcaagcccctgaagaatgcctcagatggtgctctgatggacgacaatcagaacgagtggggagacgaagacctggagaccaagaagttccggtttgaggagccagtagttctccctgacctgagtgatcagactgaccacaggcagtggacccagcagcacctggacgctgctgacctgcgcatgtctgccatggccccaacaccgcctcagggggaggtggatgctgactgcatggatgtcaatgttcgaggaccagatggcttcacacccctcatgattgcctcctgcagtggagggggccttgagacaggcaacagtgaagaagaagaagatgcacctgctgtcatctctgacttcatctaccagggcgccagcttgcacaaccagacagaccgcaccggggagaccgccttgcacttggctgcccgatactctcgttcagatgctgcaaagcgcttgctggaggccagtgcagatgccaacatccaggacaacatgggccgtactccgttacatgcagcagtttctgcagatgctcagggtgtcttccagatcctgctccggaacagggccacagatctggatgcccgaatgcatgatggcacaactccactgatcctggctgcgcgcctggccgtggagggcatgctggaggacctcatcaactcacatgctgacgtcaatgccgtggatgacctaggcaagtcggctttgcattgggcggccgcggtgaacaatgtggatgctgctgttgtgctcctgaagaacggagccaacaaggacatgcagaacaacaaggaggagactcccctgttcctggccgcccgtgagggcagctatgagactgccaaagtgttgctggaccactttgccaaccgggacatcacggatcacatggaccgattgccgcgggacatcgcacaggagcgtatgcaccacgatatcgtgcggcttttggatgagtacaacctggtgcgcagcccacagctgcatggcactgccctgggtggcacacccactctgtctcccacactctgctcgcccaatggctacctgggcaatctcaagtctgccacacagggcaagaaggcccgcaagcccagcaccaaagggctggcttgtggtagcaaggaagctaaggacctcaaggcacggaggaagaagtcccaggatggcaagggctgcctgttggacagctcgagcatgctgtcgcctgtggactccctcgagtcaccccatggctacttgtcagatgtggcctcgccacccctcctcccctccccattccagcagtctccatccatgcctctcagccacctgcctggtatgcctgacactcacctgggcatcagccacttgaatgtggcagccaagcctgagatggcagcactggctggaggtagccggttggcctttgagccacccccgccacgcctctcccacctgcctgtagcctccagtgccagcacagtgctgagtaccaatggcacgggggctatgaatttcaccgtgggtgcaccggcaagcttgaatggccagtgtgagtggcttccccggctccagaatggcatggtgcccagccagtacaacccactacggccgggtgtgacgccgggcacactgagcacacaggcagctggcctccagcatagcatgatggggccactacacagcagcctctccaccaataccttgtccccgattatttaccagggcctgcccaacacacggctggcaacacagcctcacctggtgcagacccagcaggtgcagccacagaacttacagctccagcctcagaacctgcagccaccatcacagccacacctcagtgtgagctcggcagccaatgggcacctgggccggagcttcttgagtggggagcccagtcaggcagatgtacaaccgctgggccccagcagtctgcctgtgcacaccattctgccccaggaaagccaggccctgcccacatcactgccatcctccatggtcccacccatgaccactacccagttcctgacccctccttcccagcacagttactcctcctcccctgtggacaacacccccagccaccagctgcaggtgccagagcaccccttcctcaccccatcccctgagtcccctgaccagtggtccagctcctccccgcattccaacatctctgattggtccgagggcatctccagcccgcccaccaccatgccgtcccagatcacccacattccagaggcatttaaataaacagagatgtgggatgcaggaccccagcttccgttcccaagccctgttgggagtcctttccagtgcttcaggatgctggggcgaccaaaggagccttttaaaaaatgtttttatacaaaataagaggacaagaatttccatttttttttttagtatttatttatgtacttttattttccacagaaacactgcctttttatttatatgtattgttttctatggcactagggaaaaacatatctgttccaagaaaataaactagttctcagagccttgattttcctggtcagggtgaagttccctgtgtgtctgtaaaatatgaacaaggattcatgatttgtaaatgctgtttatttattgattgcttctttccaaaatcgaaaagaaagaaaaaagaacgtgacaggagaagggaagctggaaactgccatggccagaattgcccctcccccacactcactgcccctccccccagcgtcacctgggatttgcagatgtgtttagaaacacgcccagaccttgaaccttgggttcatggattagttttgtatctaaaacaggaaacaagtcagatgatgtggtttgtacactttctgtaaccaccagtgtggacttgaagaagtgtcctcagcatgtgcagagtctactacccagtaccagtcgtgagtctgcaggctccagtgttctgtagtagtgtttatgggccttgggagtacttctcccctgccctgccccactgtccccttcctgacaacttgagccagtaagccatgcagggtgtggtgcctcctagagaaaacactgcctggactgttctgtgcatccctccaaacagcatcatccaaatccaactgaggacagacggactgtcccggcctgggcctgggctcctaacacctgactgccaaagggctccaatgtgcattgtggactcgccagagtagcctgcattgagactccaagaaaacagaagctatgtggcctctgatccccaaactggcctgggtggggacatgccttgagtgtgctggaatgtgggtggagcctgcttctgggccacccctcctggttcagggctgtgctcacagcagattcttgcagtatcaagtatacgcctgtggcagaataagtatctgtaaatacatgtttaaagatggattttgtttaaaaaatctaaaggaacaagtgtgtcg

SEQ ID NO: 15 - protein, 2505 aa, Mus musculus
MPRLLTPLLCLTLLPARLRCSQPSGTCLNGGRCEVANGTEACVCSGAFVGQRCQDSNPCLSTPCKNAGTCHVVDHGGTVDYACSCPLGFSGPLCLTPLDNACLANPCRNGGTCDLLTLTEYKCRCPPGWSGKSCQQADPCNPCANGGQCLPFESSYICRCPPGFHGPTCRQDVNECSQNPGLCRHGGTCHNEIGSYRCACRATHTGPHCELPYVPCSPSPCQNGGTCRPTGDTTHECACLPGFAGQNCEENVDDCPGNNCKNGGACVDGVNTYNCRCPPEWTGQYCTEDVDECQLMPNACQNGGTCHNTHGGYNCVCVNGWTGEDCSENIDDCASAACFQGATCHDRVASFYCECPHGRTGLLCHLNDACISNPCNEGSNCDTNPVNGKAICTCPSGYTGPACSQDVDECALGANPCEHAGKCLNTLGSFECQCLQGYTGPRCEIDVNECISNPCQNDATCLDQIGEFQCICMPGYEGVYCEINTDECASSPCLHNGHCMDKINEFQCQCPKGFNGHLCQYDVDECASTPCKNGAKCLDGPNTYTCVCTEGYTGTHCEVDIDECDPDPCHYGSCKDGVATFTCLCQPGYTGHHCETNINECHSQPCRHGGTCQDRDNSYLCLCLKGTTGPNCEINLDDCNPCDSGTCLDKIDGYECACEPGYTGSMCNVNIDECAGSPCHNGGTCEDGIAGFTCRCPEGYHDPTCLSEVNECNSNPCIHGACRDQGYKCDCAPGWSGTNCDINNNECESNPCVNGGTCKDMTSGYVCTCREGFSGPNCQTNINECNPCLNQGTCIDDVAGYKCNCPLPYTGATCEVVLAPCATSPCKNSGVCKESEDYESFSCVCPTGWQGQTCEVDINECVKSPCRHGASCQNTNGSYRCLCQAGYTGRNCESDIDDCRPNPCHNGGSCTDGINTAFCDCLPGFQGAFCEEDINECNPCQNGANCTDCVDSYTCTCPVGFNGIHCENNTPDCTESSCFNGGTCVDGINSFTCLCPPGFTGSYCQYDVNECDSRPCLHGGTCQDSYGTYKCTCPQGYTQCQNLVRWCDSAPCKNGGRCWQTNTQYHCECRSGWTGVNCDVLSVSCEVAAQKRGIDVTLLCQHGGLCVDEGDKHYCHCQAGYTGSYCEDEVDECSPNPCQNGATCTDYLGGFSCKCVAGYHGSNCSEEINECLSQPCQNGGTCIDLTNSYKCSCPRGTQGVHCEINVDDCHPPLDPASRSPKCFNNGTCVDQVGGYTCTCPPGFVGERCEGDVNECLSNPCDPRGTQNCVQRVNDFHCECRAGHTGRRCESVINGCRGKPCKNGGVCAVNTRFICRCPAGFEGATCENDARTCGSLRCLNGGTCISGPRSPTCLCLGSFTGPECQFPASSPCVGSNPCYNQGTCEPTSENPFYRCLCPAKFNGLLCHILDYSFTGGAGRDIPPPQIEEACELPECQVDAGNKVCNLQCNNHACGWDGGDCSLNFNDPWKNCTQSLQCWKYFSDGHCDSQCNSAGCLFDGFDCQLTEGQCNPLYDQYCKDHFSDGHCDQGCNSAECEWDGLDCAEHVPERLAAGTLVLVVLLPPDQLRNNSFHFLRELSHVLHTNVVFKRDAQGQQMIFPYYGHEEELRKHPIKRSTVGWATSSLLPGTSGGRQRRELDPMDIRGSIVYLEIDNRQCVQSSSQCFQSATDVAAFLGASLGSLNIPYKIEAVKSEPVEPPLPSQLHLMYVAAAAFVLLFFVGCGVLLSRKRRRQHGQLWFPEGFKVSEASKKKRREPLGEDSVGLKPLKNASDGALMDDNQNEWGDEDLETKKFRFEEPVVLPDLSDQTDHRQWTQQHLDAADLRMSAMAPTPPQGEVDADCMDVNVRGPDGFTPLMIASCSGGGLETGNSEEEEDAPAVISDFIYQGASLHNQTDRTGETALHLAARYSRSDAAKRLLEASADANIQDNMGRTPLHAAVSADAQGVFQILLRNRATDLDARMHDGTTPLILAARLAVEGMLEDLINSHADVNAVDDLGKSALHWAAAVNNVDAAVVLLKNGANKDMQNNKEETPLFLAAREGSYETAKVLLDHFANRDITDHMDRLPRDIAQERMHHDIVRLLDEYNLVRSPQLHGTALGGTPTLSPTLCSPNGYLGNLKSATQGKKARKPSTKGLACGSKEAKDLKARRKKSQDGKGCLLDSSSMLSPVDSLESPHGYLSDVDPLLPSPFQQSPSMPLSHLPGMPDTHLGISHLNVAAKPEMAAGGSRLAFEPPPPRLSHLPVASSASTVLSTNGTGAMNFTVGAPASLNGQCEWLPRLQNGMVPSQYNPLRPGVTPGTLSTQAAGLQHSMMGPLHSSLSTNTLSPIIYQGLPNTRLATQPHLVQTQQVQPQNLQLQPQNLQPPSQPHLSVSSAANGHLGRSFLSGEPSQADVQPLGPSSLPVHTILPQESQALPTSLPSSMVPPMTTTQFLTPPSQHSYSSSPVDNTPSHQLQVPEHPFLTPSPESPDQWSSSSPHSNISDWSEGISSPPTTMPSQITHIPEAFK

SEQ ID NO: 16 - DNA, 72337 bp, Homo sapiens
  misc_feature (1)...(72337): n = A,T,C or G
ccgagatcacaccattgtactccagcctgggcaacaagagtgaaactccgactcaaaaaaaaaaaaaaaaaaaagaaaagaaaagaaaaaaaaaaagcactcccgtagagagaacccagcgggttctgccactgtcccgagtcacgctgagaatgcgagggtgtaggtgtcagccccgggggacgctggccctgacacaggctggcttccaaggagtcttgtccatgaggattcaaggtggcagacattgatttcatattctaaggaaaagacagtgcagctcctttgggaagctcggcctcccggcccgctatgcctcagcctggccccagacacagccaacagggctgacgtcctcgggaagacgctgtgacctcagacaggcctcgggtttcacctgaatcccaggggctgggacctacccttgtttagtttccacgcggaagccaatttgggacgtttgtgacccagacgaaccctttcagtggttttgtcctttctttggagaagggactaggacgaagaaggctggactcatggggcggcccagggcacagctgggccctcgtgtttctccgtgcgttttccagaaagcctccagccctgcctcaatcatgggttggctctgtcgctattccgagtttcaccgttgtcatatttgagcagagcttttgccccgaccagggatgagaacgtcgtctgccagtctcctctgcagccggagtggccacaggcaggcagagggggaaggcagagtcctccagccgggaagagcgccaggccaggcagcctctgctgtgtaaatcgacaggcttaaggctgctcattatgtggtttcacctgaagagcgacctgccgtagccaccgccagcaagcgtgtatggaggccggtgcctggcgagcgtcggggaagctgctgagtccctcacttcccccagtcaatcccggcagccttgcgcaaagcttggttaattcaaaaactgtctttgtctgcattaaaacacctttatccctggtattaatttcctggccagaacaaattaccaaaaatttggtggcttcaaaccgcagaaatgtgtgctctctcagttccgaaggccagaaatccaaaatctgggtgtcacaggaccgggccctctcccaaggctctagggaggatccttcccacctcctccagcttctgttgggtgccggcaacccctgtgctcccagcttggggctgcgctgtctccagcctctgcctgtcttcccagcgccttctccccaaacctccctctcctgccaagggccccagtcgttggattagggcaggccccactccagcatggccttgtcttaactcgacgacatctgcaaagacccatctccaaaacaggtcctgctcacaagctctgggggtatacagcgagtcttttgggggaatacgagtcaacccacagccccccatgagtgacgagtgacagacctggagcccactcctgggggtggagggaagcacagaggaggaggagaagggtgtggacggggctgagcttgccccatcattgaagggaccagcccacaggcctggcccaggctggaggcaccagcgagcactggctgtcattaatcctgggccccagggttggtccacagggccagggtggccagggtcggggtgtgctcagagccacttggctggaatgttctttcccagatgcctgcatgcaggaggctcactgttcacatctccccctttccacgagggcctccgtcctggccactgtccccccagagcctacgctgcagggaaggggctccgcgaatacacttttgagtccaggggaggccctcctacccctaccaggtgcacgtcctgctgctgtttggatcttctcaaaacctaagtcggtcatctgtgcccagtgtgagggcggctggctccacagtccaggctcagccaatgggagaggcagggtcctgggggcctcttcttacagcatcaggtctgttcctgcccaccaacaggtggacagatgacagacagagaggccggtgcggcctgtccagagctgctgtgctcggcacacctcagtcagggtccctgggccccgtcggtcctccgcagcggtcttggaagaacagggcctcacacagccctctccccagccgttctctttctggctcacagagcgcccaggctctaggggctgcagcccgggggggctccatgcagtcggcatctgcgttccttcactcttcttcccttgaatgaattccaagccccactgttctaaggaggaccagacgttaccccaaccacactcaggacccccagctttggggaaaggaggacagacccgccccccatatgagtgagggctgccagcagggcggagagagagggggctggtgtcagattcattgcagtggcccccttccccccctacactgaggaactcccaggcacggagggactctccagccagccccatgtcaccaaggagaggtggcagaagggagccccccaacatagaccctcgctctcgccagaagagtcctgggctcatcaccccttcccagccctgacctcagtcgatgggaacccaagagtgaggaaaccaagacattctctgaggccctcccagagacccttcaagaccaaaaggctggccaggtgcagtggctcacgcctgtaatcccaacacttcgggaggccaaggcaggcaggtcacccgaggttaggagttcaagaccagcctgaccaacatggtgaaaccctatctctattaaaaatagaaaaattagctggcgtggtggcacatacctgtaatcccagctactcggaggctgagacaggagaattgcttgaacccgggaggcggaggtggtagtgagcggagatcgccccatgacactccagcctgggcaacaaagtgagactccgtctcaaaaaaaaagaccaaaaggccatgagatgcacccggtaggggggtgctcagtgtcccagatacattcgccacccctggggcaggctctgaattcaggtccctgaacgtgggtctgtgtggcatccccagcaaggaggggaaggggcccaggggtccccatgtctgctgcaccaccacaagcccctgggaacaggcaatgccatcccagggcagcctctggccttcacttgctacaagtgagtttatccccctctccactctagagatagtcggtctgatttatgtcgtgcaaaggccctcaagtgattagagtatccctcggagacaggctctgggaggcactgggaatccatgcttccagctggggccacgcagtcacagccacatgaaacgctcagacttttcttgctgatttttgaaaattattgcaccaaatgtttaccagtgaaatgctgatcgtgatgataagaaggctggggaggccaagagaaaagggaagagagagtgcagctgcaaacccttctccgggcccgagaagcaccgctctcctgcgtgttcaactggcatttgccaccaacatgtctgtttttatttaaatggcccagagcaaggctctgactaaactagcattcccacgccaacactcagcagcgcctctggtttttggcagattttttccttagctgtcaaagcaaaactatagaagcgtcctggtcttacttaaggcttgttggggctttttgccttcccccggagacccgaatagctcgcagatgtgcggtacctgcttatgttcgtgctccgtgttacttcacgagcagaattccccgtgctctctgtaacccacaccccgatttccaggcccatgttcatttgcagagggggtccgtgggggtccgcgggggggagtatggggggacggaagttctcagcttgtttaaatgtgtctggagcaaatggggggaaaccccggccacctgagaaactctcgcctcgggcggctgcttctccatcaccccagcggtgaggtcaaggatggcccaggctccacttggggcaccaggcacaggtcggggtggggtggggggtgtggtcaaagtccttcaggggctcctggctctgccggtggctcctccggggcaaaggactgtgctttgggacaccaacattgtccctctaagattaaaataaacttttttaagggggttttccagctatttttaccctcagaaaagaagaaaggcaaagacggaggaagggaagaagatgaaaggaacgaaagaagagagggagagagggaggcaagaaagagaagtaaagcaaagagaaaaagagggagaccgagaaagggggaaggaggaaggaaggagagggagggggaggggccagcccatcccggctttcccagtgactcagccctcggaggaggctcggggtttgtaccagagcccaaggggtggagcctcgaagtttcgtcccccggggctcttactttttggagaaagttctgaggtgaggtgggcaggggccaggcagggtggaagatcacccccaccacaggctctgcaggggtccctgggactgagtagtttgggatcatgggggtctgggggtagtgagggggcatggggggtgcagatggacctggtggccaagctctgccaccccactcagagcctctgtgcccccatccaacagccaggcatcgtgacagcctccctgtctggtccagccccccacagcccctacctggaggtgccagccctggtgctaagccgcctctgtgcccatcctcctgatgtctctcctcctggaagccccctgatttgggcaggcctggccaacttcccagtgcatgcacccctcaaacggcacgccaaccagggccccagccaggcactgcctctgccgtctccctgggactccctggaagcagcagaaatgggcctttggctcccaagtgacccaaccccagcccaggctccacccacgctctgtgggctgctgaggggacctggggtcctggaaaggtctgagtgggctccccacttctcagggctgggagaccatacccaggcctatctactgtctttcccactgaggtctgtgctctgagcagtctaggggcttccagggacaggcaggtgggtctgagccctgagccacgtggaaaggacgggcaggtggcctccacctgagatctgcactgcaccagccaccccccaggcccagctctagaatgacaatgccaggtctgccccacggccagtcctgcagctctcgaggcctacaccagctggggccttctcagctcacctgctcaggaggcccagtgcctgcccggggacttgcccgggcaactcactcccccagcctctgtgcagaggggaacagcagggcctgcctctcggatgctgaccctatcccatgcctcatgggcagcaaggggggcagtttctgcatggggaccattggagacactgagtagacagggccccgggcagagtcctggccacagctggggatcactgtcctggcaactgggtccagggagggtaccaggcgcctggcgggagggctggccacagcagcaggcttgcatggacagccagttgactttgcaccaagaaaagcccctgccgggtctgcgcccacattccttcagcttcttgcagtcacaggtcagtcagcaaaccttccggagcctctggtgtgggtcggaatggtagggatgggctctgcctcacacacagagagtgggtcaggaaggcttcatggtcaggggtgctcagacggccgagagcctctgggatggctgaggagtctcagggacacgtgggaaagagaccccctcggcaaaggacgaggcctgcaacagcagagcagggaagtccccggcacagaccgaggggtgcagggcatggggagcccctgtgagggccagggtgagatgcccagcacctgcaggcacccctgggcctgggtgacggtggctgtctgcacacagcaggggaccaggaagcagattccagaccccagcctcctcagaacaagggccgttctctgttctcagaacaagggccggcccgaatccatcctagagcaaggactgccaggtgcgtcacagcggaccgcccagcacaggggaccaggtagcaagcgagacactgaaaccacatctggaaaaatgcccaacctcgaggaaatgtcccaagttctttataagtggagaaaggcagatggggctttaaaaatcacttggtgcagcagaacctgaggcccggcggccagcgaaggccccacggtgtgcccgatggtcaggggctgcagtggatggggacgtggaggctgcgtaggaggcaccctggaggctggacaccctggaggcctctgggcttgagctttgcacgcaggtcagatgttttttacagtcagcttcaaatggtgaaggggccctactcctaggtggtctggaatgttcccacagctgcctggtggtggcccccacccaggacccagcagggtacccgccacaggacgtccccgcactcagccccgcctcagagcccccacgccccctgctttcagtcccaggggccactccaacctggccacgccaagccatggtccctgcaccgagtccagcctgctgccttgggcggtgaacagactgtgagtgtgggggaggggaggagtgtcccccaacacctcatgggggtcccacttaccctactggatgacagcagctgaggaccaaggcctggctgggccttgagctggcatcctcatgatgtctctgagcctcagcttccctcctgaaaaatggggagcatcatgctagccgccccccagcgccacagggtcatgggggctgcaagagccaagatgaactcctgcaggaaggaaaggggccttgggctcagcaccgggagtctcagccctggctgctccttagaatctactgcagagctttcaacacaggcacccctcaaatacacccacccaccaggtcactgctgacccccctctactcggaccacatctctctggggccggagccggccctggggtgttttaaggtcacctgggtctccatgagctccgtcgctgtccccgtgtgctcaccagctgtgcttacctctccatgcacttaggggtgtgctctgctctcgaaagtccccacagcagccgcaaaggaggggcctggttgggccaatgtcagcagggcctccttagctcaccctgacaatggtacccccatttctctggcagcaaacaagggggaactgacccagttcagtctcctggggtgcaacgcctaagccactctcccctcagcacccgcagggggcctctgaagaagagagggctgcaggacacgtctgcctctcccctccgcaaaccaggctctgcggccccatctcatctgcttccaggctccctggccagcttgggaacagccccattcattcggggtacccctggaaccttgccccagctcccaccacaagttgggacaggaagcccaaagtgactcctacaggggaggcctggcggcactgcaccccaattcagcttcttggggtcctagcccccaccctcccattgggtttctggagtggctggggtgccctgcacacaacctgctcttgtttctctttagtccccgcaatgcccgctgcccagggctgcctcccgacctgtaggagaaggtctccaggccctaggccagcagatgtactcctgttgtgtcaggaccccagcctcccccgactgcccacacccgctggcctgacaaagaggaatggggagcccggacaacttgtgaatgaaaaagcttctcacctacttgccaggggcctacccccttcccaggctggtggggaggtgaggcccatccccctcatccctggcttctcctcggccacagctgtccatggggtactcccggctgtgggtggtgcaggggttgggagctgggaggccgaggcctgtgcttccctcgggcctgtgcacccggccgcaccatccgtaacgcgggcttatgagcgtgcctggctgctgggtggcctgacgggtggacaccgaatgggccactctcttctctgctggtagaggatggaggcccaaggtggaggtgctgtcggcacagctggggcagaccaggggagaccccctatccagggatcccctcctcccctcccaggccgcccctccgcaaaatgctgaggactggcccccgggcctgggctacatgggccattacttctggcctggggcccacaggcagagatgccaatggaggcacacaggcagtcgcacccgcacccgatcagcaccaggcctgaggccttcgggcctccctatgccccaccccacccccacccaccaggagcagaggacgtcgtggtgggcagagtcctcagcctgggagctgcacagccccgcgcttccttctatggaaaatctgctcctccaggctgcctggctgctgttacataaacatctctgctgcctccaggcgcctcctctcctggggcgctgaccccaagatgttaccccaggcctgcagaagtgaggccagattctgggaggacgcaggcgagggaggctcccagcagcagctacaggggcgggacaggccgcctgcactggctgtttccagagtgctcagcatttggcaagaggtgtgccaggaaaggcttgctggggtcaggtgtgagatttgtcctgctttctgtgcctgcctctgccaccatgctctggggtttctgcagccctccccccaggcccccacagtcctaggtccctcccagcctttcggtctccccgcagggcaggcttagccctcctactccaggaggggcgccgggacacgcgccttctgccatcgcactcaccaccctgtgttggggtggggagggggcgctgtctgtccctggcacgaggccgtgaactttgcgcagggactatggcaggcattttggactcctggcgcttaaccaggcttggcacagggtgcccgtgcctggcatcgtggtggagaaataaatcagccggaaggagcacgtgggaggggctgcgccggcgccagcggcagatccgcccgacccgtttgtgctttctggggccaccttaggcaggcggcgcccgggcaggaggaggacggtgaccgaggagcgtgtcgacgcgggtcccccttgggggagcggggcacaatccgtccgcgaggcactggtcccggctgctccctcggggcgcccggagtcccctgcccagaggccgcggcgcccccatccctcgcggtcaagtgctcgggcaatcacggccagggatgtctggcggcgatcgatcctctggacgcctaaagccgcggccacggggccctcgggagggagtgaagccgctgggctaggggcgcacacacggctaggccactctcccagagccctgccccgggcccggggtcccccaacgtggcctcagctgctccccgcccggcccagcgcacggtgcacacggctgtccgcggcctcgccctccccattccgccccgggctcctccgcttattcacatgcaaatttcagtcgccagttgtcgccgagcgcggcaaccgccagagccggatccttccgcagccccggctcaaacttttggcctctgaaaactttcaaacgagaagtagtcccaggcgcccgctcccgacccacgccgcgccgccgggtccctcctccccggagaggctgggctcgggacgcgcggctcagctcggggaggcgcaaaggcggacggggcgtgcgggaggaggtggccgccgagggggccgagggaccggcggtggtggggccgggcggagcggggccggcggtggcggnnnnnnnnnnnnnnnnnnnnnnnnnnnnnnnnnnnnnnnnnnnnncgcagcgaaggaacgagccgggcgcggagccgggcccgggggcctgcgagagcacagcgccgccagccagccggggaagagagggcgggaccgtccgccgccgccccgggaccgtacgccgcgcgtgtgcgtcccagccccgccggccagcgcaggaggccgccgcccgggcgcagagggcagccggtggggaggcatgccgccgctcctggcgcccctgctctgcctggcgctgctgcccgcgctcgccgcacgaggtaggcgcccacccacccgcgagcccccactttccgcgccctttggaaactttggcggcgcccggcgcgcgcgccccacggctgggagcgggcggcggggaggccagcatggagagggaaaagcgggcggcccggggcgtggggttctggagtcccgggatcagggaggaccgaccttccccctcgatccccccgtggaggcggactcgcgccgcccgtgcctggagccgagttaggaggccggtgtggggtgctggggccccggaggccctactccgggcccgcccttcacccgccgcgcgtggggcttgccgccggtcggccgggcgggcgggctgcctactatttttcgatttgaatagagtcggttttggtttcctgttgcttctccgggccatttatcttctttcttcttcgcctctggcccacgccggggcggatgttggggcgcggagtgtgggctctgcggcgccgcgttcgccttcactgacccgcgcggccgggctgggtccccgggctcccggtcgccccgcccgccggtgccccccagcccggctctcagtttgggggaggggttgcgtaagaagccgccgcgcccggggggactgaactttccttttgctttgcggagttgaagtttggaaagcttgggggcggagagcgggacgcgggtggggggctcttacatttctccccgccgcacagcgagcggggtctctggggaatcgagtgattaatccactctttctccgagagttggaggcgagaattatctgtcctcttccagaaagtgcggctctgtgtcacacccccctcccccgtttctcagccccggtaagatggggagggaggggcttgagtaattgatcccttctcgagatggggtcgaattccttccgaatgggggaccttcatccccctcctgtgggtgtatgggggctgccctggagatgcgcgcccgcggaggcaggtattgggtgtcggcggaggcggggccgcgtccccagggtgctgtcccggtgcccctggaggcggccccgactccacaatgggccgctctgattctgaggcggaggccggcgctttgttggcgggcggggtagcgggcgagcagctgtcgcattttcccacgggcgggagctgagtgtggccaccccccctccccccgtccagctctgcccccttgcagaacgggtttgaacagaggcaatctcggcggctggatggggggccctgccctgccagactcctcagtgagcctccagggtggggggcaacgctttggagagtagcccactttgtctctgcttttcccccactgcgtccaggcggcacatcaggccaccccaccctgcttcaagcaggacgtgttccctgctgctccccttccccccatttctgactacagaactctgggcagaatgttgacgcccctttggtttcatggaggggcttcctgcggacccgtgccccagcaacccatgatactgagcagagtgcgtccggggtagggggcggacgatgccccttggctgggtgcaggtccccgcccccagggtaaccagggccttcggtggtggtggtgcgggtgagactgacctctcttctcctgcccctgcctaggcccgcgatgctcccagcccggtgagacctgcctgaatggcgggaagtgtgaagcggccaatggcacggaggcctgcgtgtgagtaccacccctgcgggacctgttgctttgtcgagggcagagcccctgccttctgcagccgcgcaggggacagaacactaggccattgtcttctggagatggcccagagtctgggcacggtcacgtgctgacttttattggacaaagtctggcaattacttaatcaccagcaattatgctgcgtgtggagctggtctggctgctgagggcttgggcactcctccgtgggccacctcaggctccggggtcactaagtgggagtcccagtaccccaattcttctttaagtccccaagaaacagttgatctgccaggggaagctctggaccatttactgagaggcccagcccccaccaccctgccaacttggggcgcctcctctgggcgggtgatgcctcctgggcacaggtgatgcctcctctcgggggtgatgcctcctaggtgggtggtgatgcctcttgggctggtagtgatgcctcctctggcacaggtgatgccacctcctgggcgggtgatgcctcctctgggtgcgtgatgcctcctgggctggcggcaatgcctcctctgggcacaggtgatgccacctcctgggcgggtgatgcctcctctgggtgcgtgatgcctcctctgggcacgggtgatgccacctcctgggtgggtgatgcctcctctgggtggtgatacctcctctaggtgggtgatgcctcctctgggtggtgatacctcctctaggcgggtgatgcctcctctaggcacaggtgatacttcctgggcaggtgatgccacctccgggtgggtgatgcctcttcaaaggaaattgactcttcaaaatcggacccgcctttgggctctctgtttgccccagctccctcttcccggcctcaggctggggctggggaagagaaggtggaactcatgttttggcgtggggtgtggggtaattattgagtctggtttctgtcctggcatctgcaaactctgacctcaaaatcccgtggcccttctggtctgccagcctcagatgtaaaatgggcactgagggggccgggaagtcgtgcggaactgctccctcctgcctgcctgtgagtgcccatcagccgtggggaactgttctgctgtggccgatgcccttcaacttgagtccatccctgatgagaataatgaggaggtgtttggtgtctggaaaaagagttccctccgccccccaggagctacagatgaagaaatggctccccagccagtctgcgcgccctcattccaactgcagaaggtcccattcccttgacaaccccagcccggctcctgcctgtgccgactgcccagcctgtgggcagcaggccccctccctccccggcccccaccctccccaaactgaagccaattaagcaggtctgtgagcagtttaatggacaaagccgattgtgtctttgtcagacactaatgaatgcgcactacttttttttttttttttttttttgctttttggggcccccttctccctctgcagaagccgcacggacgcttgatgccctaaatcttgtttcctttcattcagagaccgacagctgggatccaggggaagtgcagcagctattgttgggggaggcggattaatgccgtgtgattaattatgcgtggcttcccagaatgtataacccccttccccgccactgcgctcccggctcggactttgcctctcacccattcggggctctgggagaagcttcttgctcctgcagaggactttgggagggtgggaggaacaccgtgctgggaaaattgggggcctgttgcttcttctcagtggcaccagggagtaggcacagcctggcccacaggggtctgggactgaggtctccctgggccagagcgctgtgctttggggtacagattgctgcagctccctggtgtctgggttaaaaccctgccacagggccgcaaaacactggtgtcatgggcccactttcccattccccaaacctgggatcccggtgagctgtttccagcccaaggcaggccgccgaccatggctttggtgcctggccttgtcccctttgctggggcctggcgccccctccttcttggcgggaagcctgcttcagtttggcctgacaggcagccgagctcagcccacagagaccccattgtgcacaccccacaagtccaacgagaagatgggacggaagcgcgtcctcaggctcctgcttctgggccgcagagttggaggccagggccacagccgagcccggcttgtggaggcacaggtcagggctcacacagcagtctgggggacattgcagccgcttcggagaaggccccgggctccctccctgggcttgagccccacccaacatacacccctcaggtgcctctgccttcccgttcctgcccatccttctcagaaggcccaggaggtctgtccaggagttagccagggcacctgcaggaggcctggctcccccagcaaggggagaaacccacactgtttctcgaaagagtctggggtgcaggctcttggagccctgccagcctgagtgggaatcctggccccgtggtatccagctgtgaccccggaaagagctttggcttttggtgccatttgctgcctccgctgtagaaggggcatggtcatgatgggcgtcacagtgcctggctcactagtactgggtgaatcatttctttccatcccaaagagaaggaaccttcaccggaagctgccaatcaggtggttgcagggcccgggattggaaaaagtggttttgttggtgcaaaatgccttcccaggaggtcagagtgtcgccgtggcctggtcagccagtggccaggtagaaagcacctggcagcacatgctggtgggcggaggatggttggtctctgggcagctgctgtgcgaggtgtggccgtggtggctgtggtcggagatggtggccttctgagcaggcccagggggtcactgtggcccttggctcttctctagccccctcatcagctccgtcagtgtgagcaaggggtactgaagagggctccaccttttttctctttgttttgaggagagctgggaagagctgcagggaccgtatctgtctgggtgagactacgtccttggtctgaaacgctctcccagggctgcctgcgtctgggctgggcgttgaggcagggggcagctaagatgttggctgctgacggcagagtcagaatggcacggggcgtcttccaggagctgggagaaatgggggtaggctgtcacacccagcacctccaggaggatgtccagctgcctgctgggtggtgcgctttagctttggacaacctcgtgtctgaggcctggcctggccactagctctgtgaccttgggtcatcaggtcatgcaagcctcagtttccccagcatgtcagccgggctgatacacgctggatctcttggtggtgtgtgaggattgcatgagaaccgtgtggagagggcacctggtcagcgctcctttcttccccgccttctccccgttggctgacagtgctggtttccagagcctccttcctgaatgtttaattgattgacgagtgaattcagagaatcctaaaggtgctgcctggtgggctgggcctggcactgcctggggagggacttgccggctctggggaagtccatctcccaggatggctccagctccggggaagtccatctcccagggtggctccagttcacagacacgtttgagcgcctgctgtgtgctgcgttctgctccaggccaggcccccggtggggacagggcagacatggcccctgctcctgtggagttcacttcccagcaaggcgtgagagaggcacctagctcacatgtgggacatgttgggggtgtgccggcccggtggtggcctggcatagctcccggcagccccgtaaagctgtctggatcaggcaccgataagtgagaagaagagacccagagaagtcgccatcagccccagggtcacacagcagtggcagaattcctactagccctgcccctctccttctcccaagcgaatgtccctaaacacagccccagccagcctgagctgccccgtcatttcccgactacaagcggactgggggcgtggcttccccttaaaagaagaggaaggaggctcaggcgggaagtgacttggccctgcagccggcctgggaggctggggagggacggggtagctcctgtcacccggtctggctctttccattgagtcacctgcctcgtcttgggcgtggccaggggaggaacaggttgattctcctcctcatgctgagctgagcggaaaggcctgtgacaggacctcctgtttatgcagaacctggtcttcaagggcgccagggttagaaaaacatgtttaaaaacatgcagcatccgaggtgggcagatcacctgaggtcaggagttcaagaccagcctggccaacatggcgaaacccccgtctctactaaaaatacaaaaattacccaggcgcagtggcgtgtgcctgtaatcccagctacttgggaagctgaggcaggaggatcctttgaacccaggagacggaggctgcagtgagctgagatcgtgccactgcactccagcctgggtgacaaagtgagactctgtctcaaaaaaacaaaaaacaacaaaaaaaaccccacacagtgtcaaatagaaagtctcacctactcagactggggagacatcaggaacaggaaggcctggggcggagactggggtgggagcctggagtgctctgaaggaagctggctccttggggcaggccctgcctctgaacagcagccaacatgttttccattgaaaagaataataatagaaaaagagagagggagaaagaaaacagcaaccctggcaggaagagggtagggcagggcagacagtgcaccaggggaagtgcttccacagggcagagctgggtgcggggacccccagatgcgggcggcaaactggagaccccacaggagccgggactggcttcattcctcattccctgcacctgtgatgggcagcagcggccaccggtgcccactgggcagttccaggccgggccgagggactgcacccttttgctgtggggaggggacctttcctgtttcatgtctcgtctataaatagtgaaaggatgtggctttgcagaatcgattgggcgtctagcttgccttcctcaataatgcagcgatgacagctccacactcaggacgccgctgttacccagcctcgtaaaagccctggcagacggccgcccaccctccaggtgtgccagtgcagttttcatccccagcgcacaggtgggaaagctgtggctgcgagggcgtggggatctgaggcaggctggcgtcagctttcaccttcatgtgcaggcatatccagaactttccggatctttccccgggctgaggaggaaataccagcagctttaacgagcggctggctttggggcatcacacctgtgggccgggctgcgtttgacggcctcgagtttcccaggcagcgctggcgctttctcctgtggggcccggagctccgaggggctgtgaagcagggctggctctgatttgctgtgctccccacactgtcccctccctgggcctcagtttccccatctgtatgtgattccccttccaactacagccagcgggaccctggggcgggctgaaggcgtggtggtggctgtgggccctgcggcgaggcctgcgctgggctcggtggtcgccccagctggggaaggggcagtggctgcaggggtgggagggtggagggaagcccttttccaaagttgcctggttgggttctccttgtggccctgccccaccccaccctgctccctgggagcaaagggagctaaggactggtttggggatggatatgtatatggagggattctgggtgatgacttattcatattacaaaatttgcctttttttgtttgttttttgagatggagtcttgctttgtcacccagactggattagagtgacgcagtcttggctcactgtaacctctgcctcccagattcacgcgatgctcctgagtagctgggactacaggcacataccaccactcccagctaatttttgtattcttagtaggggcagggtttcaccatattggtcaggctggtctcaaactcctaacctcaggtgatccacctgccttggcctctcaaagtgctgggattacaggcgtgagccactgtgcatggccacttttttgttttttgagatggggtctcaccctgtcacacaggctggagtgaagtggtgggatcacggctgactgcagcctcaaactcctgggctcaagcgatcctcctgcctccgcctccagagtagctgggaccacaggtgtgcaccaccatgcctagctaattttaaatttttttgcagaagcggggtcttgctatgttgtccaggctgaaaatgtgacttttgaactaaagcatgctgttgcttgacatctagtccattcacaagttcattcaaccactatctagttccgggactttctcactgcacaaaacagaaactgtacccaaatactgtcactctgccctgactgccccagcccctggcaaccactaacccgctttctgcctctgaattcgcctcttctggacgttgcctatgaatggaattgtgccataggtggtcttttgcccctggcttctttcactgagcgtgatgtgtttaaggttcatccatgtcacgcgtggactagaactgcattcttctgaggactacattttagcctccagaagcatcagggactggccagaggtggaccccagcatcccagctcccagacagtccagaggaggcaggtgttgggagggcgtccggggtggcttcctggaagagatggcgctcactctgggccggtgcagccacccgacagccacagagccccctagagggagtcctggcatattcccaggtgaacctgtaggatggactggcgtgcccgcggcccctgtcctgctcaggactccgagacaggctcacaacctgtccctgggcctcactcatgccagccgccaagctgttcagcatcccttagcccccaggaggcacacagtggggccgcggtcactgagcgtccacacgcctggtgctgtaagaatgcaaagtagagggtctttattgagcatctactacatgctgaaccctggggtatgggtgggcacggcagatgcaggcccccctgggcaggggaggagcatgccccttaagaaccaggccacaggatggacgggcttggccacaagctaggggtagtcactgcagccttcatggcctcctgtgtgcaaagtcagtgctgtgggaccccatctgggtgcacctgctgtggctttcaagtgaggcccaccacggagcagcttccacgctggctgggacagggtcagcggcaggaagctccagaccaaaggagcggcggtggctggggcagcggggggcagtgaggctttggacacatccatggggcgggcaggcatctcagcccccacccgcccagtctgcctgctccggggccttcccttccctggacagagctctgtgtgattggctccaggctgcttctccccctggaccctcagggtcagcttagagtgactggctatgccctggcctagatccaggcccgtgtgacaggagagagctaggaacctggcccctcactctgagacacagatggtgtcctctccaagttgcccttgggacggggaagcgccatgtcccctgcagggcaccaggccagccagtggcccttgacagcgaggccctgtctgcaggcagctgggggacttctccctgtcgggaggatgcgtgcgtgttagcatcggggtgcctggttgccccaggggtggtgcagggcggttataggcggtcctagcattttggggttgctttcagtgtatctccgagacctgtggaattctgggaggagaaactccccagcagtgtcctcagtgcgcccccctaccctgtacccgttgctcctgggagggatcctgagtgctcccccccacccaccatgcacccattgccccaggagggatcctgagtgctcccctctccacccaccctgcactcattgccccgggagggatcctgagtgctcccccctccacccactcccaccctgcacccattgcccctgggagggatcctgagtgctccccccgacccaccctgcacccattgcccctgggagggatcctgagtgctcccccccccacccaccctgcacccattgcccctgggagggatcctgagtgctccccccgacccaccctgcacccattgccctgggagggatcctgagtgctcccccccccacccaccctgcacccattgcccctgggagggatcctgagtgctccccccagacccaccctgcacccattgcccctgggagggatcctgagtgctcccccccccacccaccctgcacccattgccccgggagggatcctgagtgctcccccctccacccaccctgcacccattgcccctgggagggannnnnnnnnnnnnnnnnnnnnnnnnnnnnnnnnnnnnnnnnnnnnnnnnnnnnnnnnnnnnnnnnnnnnnnnnnnnnnnnnnnnnnnnnnnnnnnnnnnnnnnnnnnnnnnnnnnnnnnnnnnnnnnnnnnnnnnnnnnnnnnnnnnnnnnnnnnnnnnnnnnnnnnnnnnnnnnnnnnnnnnnnnnnnnnnnnnnnnnnnnnnnnnnnnnnnnnnnnnnnnnnnnnnnnnnnnnnnnnnnnnnnnnnnnnnnnnnnnnnnnnnnnnnnnnnnnnnnnnnnnnnnnnnnnnnnnnnnnnnnnnnnnnnnnnnnnnnnnnnnnnnnnnnnnnnnnnnnnnnnnnnnnnnnnnnnnnnnnnnnnnnnnnnnnnnnnnnnnnnnnnnnnnnnnnnnnnnnnnnnnnnnnnnnnnnnnnnnnnnnnnnnnnnnnnnnnnnnnnnnnnnnnnnnnnnnnnnnnnnnnnnnnnnnnnnnnnnnnnnnnnnnnnnnnnnnnnnnnnnnnnnnnnnnnnnnnnnnnnnnnnnnnnnnnnnnnnnnnnnnnnnnnnnnnnnnnnnnnnnnnnnnnnnnnnnnnnnnnnnnnnnnnnnnnnnnnnnnnnnnnnnnnnnnnnnnnnnnnnnnnnnnnnnnnnnnnnnnnnnnnnnnnnnnnnnnnnnnnnnnnnnnnnnnnnnnnnnnnnnnnnnnnnnnnnnnnnnnnnnnnnnnnnnnnnnnnnnnnnnnnnnnnnnnnnnnnnnnnnnnnnnnnnnnnnnnnnnnnnnnnnnnnnnnnnnnnnnnnnnnnnnnnnnnnnnnnnnnnnnnnnnnnnnnnnnnnnnnnnnnnnnnnnnnnnnnnnnnnnnnnnnnnnnnnnnnnnnnnnnnnnnnnnnnnnnnnnnnnnnnnnnnnnnnnnnnnnnnnnnnnnnnnnnnnnnnnnnnnnnnnnnnnnnnnnnnnnnnnnnnnnnnnnnnnnnnnnnnnnnnnnnnnnnnnnnnnnnnnnnnnnnnnnnnnnnnnnnnnnnnnnnnnnnnnnnnnnnnnnnnnnnnnnnnnnnnnnnnnnnnnnnnnnnnnnnnnnnnnnnnnnnnnnnnnnnnnnnnnnnnnnnnnnnnnnnnnnnnnnnnnnnnnnnnnnnnnnnnnnnnnnnnnnnnnnnnnnnnnnnnnnnnnnnnnnnnnnnnnnnnnnnnnnnnnnnnnnnnnnnnnnnnnnnnnnnnnnnnnnnnnnnnnnnnnnnnnnnnnnnnnnnnnnnnnnnnnnnnnnnnnnnnnnnnnnnnnnnnnnnnnnnnnnnnnnnnnnnnnnnnnnnnnnnnnnnnnnnnnnnnnnnnnnnnnnnnnnnnnnnnnnnnnnnnnnnnnnnnnnnnnnnnnnnnnnnnnnnnnnnnnnnnnnnnnnnnnnnnnnnnnnnnnnnnnnnnnnnnnnnnnnctgcctaatgcaaagcggtggcttcgggtgggtccccaaggggccttgtgaaccctgggggcctggcccctcccacctggctgcacccgctgggcgggagatcccatcctccgagtcctcagcccctcagcctcagctgcagcccagacaccagggctctgtggggcgggggtggggcagcggttccctcaggtctgtggggctgccctgctgtggttcctgcaatttcctggaaggaggtctggggcctggtgtccagtggggcctgtggggacggactcgggggctctgtggggagggactgggggctctgtggggacggacttgggggctctgtggggagggactggggggctctgtggggagggactgggggctctgtggggagggactcgggggctctgtgaggagggactggggggctctgtggggagggactgggggctctgtggggagggactgggggctctgtgagagggaactggggggctctgatgtgctgggcgtgcacaggggaggctttgcctctgacatccacacctgcagttcccaggcacacacagcggccccatcggggtcctcgcaatcacagtctgtgagtggccactaccaagggcgtctccggatcaggccaggcccagatgctgcccggacccaacccccacagcgcctgccgccacagtagggaccaatggccacagaacactcacccggcctcacttgcacggggctgttcagtctggtgggcaccaggtgggcgctgttctcgcccagtgggaggcctgccagctccttggttgctagttgagatttttccccaagaaatagtcgtgttgttccttctgctccgcctggcactgaggttggtgacacgccccgaccttgctctaattggcagatgagaatttgtcatcagatgtcgaccctgtctacgcagtcccctggcctgggagtccgttgtgcatctctgaagggcttgaattggttgtttaaagctgggtaaatgcccccttgacattctgttgacactgtcaatttgctgaacaaactcttccacaggtagcacaggaggccagtctcgccccagcctgagccaaggcccagggaggcaggtcctgtgtggagtcagcctttttgtgagtgcagcggccctgcaggatgcaccgggtttgagaagtggactcccccgtctcccgccacatcccaaaagccctcagccatgagggcaggacgaagccgacggtcgccctcgtgccgagatgacaaccgggcacagaggcggtggctcccagcttcctgccctcttccccgtagtggggttacccagcgtgactcatggcccgagccacaggcacccgcccagggagccacggcggggagacctggctttattagagatgcgttcgtgcctcatcaagtccaaaggaggaaactggcgcgtccctcactttccctgaaacaggctcccccacagcccaagcggtcaggttaaggtgcatttgcagacagatgccctagtaggaggctggagcttttggcccagaattttccctgctgtaggcccatggtcaccgagcctgcccgggggctgaggccctgaggaggtgccattgccccacccaagcctcagacaagtgtcctgccctcgaccctgcgggaggcagcagctcaggccctgaccctggccagagagggcagctctctgaggctgctgtggccgtggcaggcaggggctgggcttgccgggccgtcgagtgggcacagagactatctgggaaggaggtgggcggtgagagctgactccccgcagccgggggacagatgagccccgtgccgcacagcagggccacgtggtggggccccccaagttccgctcggtttcagctgttgacgagcggaaacacacagttactggaaatgagaggtttgggggagccgccaggggttgaacatgtgtggtttcatgttcacggctcaggccgtggcgaggtcctgtcctgggcctccagggtctggcccagcacagagctctgcagctctctggtggacgggcctggctgggctgtcggcagccctggggccaggtgggcagtgggaatggaggtggaggcaggtgggtggctgcaggtgactggaaggcttggctccagcctgcaggggctgcagtccaggccggccacccccacgagaccttcccccttccaggtgtggggtggcactgggtcaacaacacaggccacggacttctttcccccacgtgggccgtgcgaccccgggccgccaccacctctctgagctcccctcctccttaggagatgggaagcggctggggccatgaagtgtcccccagggctcctgacagccccagctgccgtcctcgtggctgggcgactgccgcgaattgttgcgccttcttttgagttggctacagagtcatggcggctgtgggaggtgtagctgggtctcgggcggcacgcccggctcccccggggatgtgtcatctgtgtcatccaccctggagccccttcctggtgctgtgggggcccctccaggaaggtctctcccagaggccagccacaggctctggggagactgtgtgggatttgcatgcagttgtgtgctatttgatcgaggtcatgtgtgggatttgggcgaggtcctgcgggattgggtgaggtagtgcgagatctttgggcgaggccgcgaggcactgggcgaggctgggcattattcagtgccttggaggggcagaagttttaggacctgccaagtccagcccaagaatccccaactttccccacagggaaaggtaccccagacagtccccagcctgtgccagctgtcttgggacaccctggtgtcccccaggttgtggcactgcaggcccctcccccaggtgcccctccttatgggcccctcccagggctgcaggcacctgcctggatcccacttcccaagtgtggggtaatcccaggcgcccggtgatcacgctgggcccgggcagagtgaggctctgagggggtgccaggggcacagtgggccagtatgtgagccgggctgggcgctgggactgggccggcaggcgagcggtgttccgagaggaggattcctgggctcggaggcccctctgtgcctcgtgtggtcagagagcagggagccggcgggtgtgatggggatgaggtgacctctggggccaccactgaagccgccgtccatctgcggccgaatcgggaggcacacagaggtgtcctggtggtttcccgggacaggcgggaggaggcgcaggagggcggcgtctgcccccgggatgccaggagtgctcctccggcagcgtgggcttcggcttcgtccctctttcaccagtgccgacgccccgcgggtgctgtgggtgaaggggcatcggtgccctcctgctgggcgggaggaaggaaggggagcgggaggctgggtctctctcgcccagggctctgcccccaccaccctagggttttgtgtttcggtggagctgtaagaatgctttgtctgctccagacttcccggtcctgggagatcaggtggtcaggcaaaacatccagaccgtctgggtggggctgggggtgcgggggacacgcgccttcctcctctttcccagggagcttctgccactcctgtgccaccctggggagctgccttgccctgccccgctctggtccccatcagcaggtgtggttctgagctgccttcagatccgggtggtgtgctgggcatagctgccccgttttctcacctgtgaaatgggcccattacacgcccccagggcggttgtgggggtcccatgagacagagcttggaaagcccgagtgtaggtcaggccaggagggtcgtgggctcagtttcttcactgctgggctggtgtgtgccggacagatgtctcgggatccctcccctccctgcagcattcttaacaaggacgctggacatggagtcagcacctccgggcgactgccctgctggctgtggggctcactccagaggagaacaggagcccctccggggagccccttcctgccacccccagcgacaggatctgttcaggagcagtggtgggaggttgccagaagcatgtctggcgctggcccggagcgcagcctgtgatgcccgacttcattcatggagtgtggtttgagccctccagcagcgctgctgtgggcctgtccattgccttccctgcctctgagccatcgtggggtgcagggctgggctgggtcttcttgggagcagagccccggcgtgtcatgaccatcttggcctctccaactcaagaggtttgtccacatgggtccctaggggccgttggggtgacccagggcaggagacacatgcctgcttttgggggatccgcgtgggaaattcccgcagtggagcagcaggtggggctccagcaggcgtttttcacactccaaacagcctgcggggcactttggtgacacctagttcctggggtctcagagcctgctgggctgtgtcttggcattttggggaggggctggccacatgcccccagagtggccaccccagctccgccatctccacgggccttctgtcggtcagatgcagacagccgttcccatgtcgggtgagggcattgttttcccggctgcgggaaaggtagcttcccgggaggacaggttctgtccccatcccgcctcccacacaaagggtttccccggagccagaggaggaaacctggccttcctgcacttcctccttcgcacattttaaaccatccgaggatgcaactgggggaaaagatttgcagacaaaagagctgggggtgccggcaacagctgtttgggccggaaagcctggccccggctcagaccccggctgggtccctgcgctgtggcgggccggccgtgacccccgccccacccaactccgccccctgctgcccgctgtctccggagcggcggctgtttggggctggctccttttctgggcccccacctccctgaagcccccactgcccctttcctccttcctggggccctgggagccagggcagggcccccgtgcagctttcagcagctccagcccaacggctgcaggcgctggggaagaccacagctcaggtgggaccgcaggtggtggctggaggcagccatcccacattgcagcccccaatctcgtggttttgtgccccaacggtgaacaggcctggtggtgctgggctgtcgtgggccccttggccccctcggtgcctgcatccctctctcctgtccaagatggggaaggaagccgggagcagaaagggaagaaagacccagcggctgcagggcgcctttcagggcctcctagccaccgcagaggctccagccagctgtttgaacaggggttgggacacagggtcctggcaggtttgaggagcccggggccttccttgctatagctctttgttctgggggatttggggaggccagggaaggggctgtgagcaacgaggttccagcatcttcccaagcctcctccatcccccagggctgggctgcttggccgttccagtgggagaggacccgaggtgggaccccgagccccctgcccagctcatttcttagcagccagtgcctcctggaaggtgggtggtgcccactgggattggggaaacttggtctagcctctacccaagggaggggctgaggtcccaggactccccctgccccagaagccttggtccgggctagagctgggctcgttggcctcatggaagcctgccttgggaagcatccccacccaggtctggccttgtctccccgtctccagtagggggtcacagtgtccccccagccagtccacatatggccccatttgcttgggcaggccgatgggtgggcctgtctgtgtggcccaggtcacctggtggggcccactgtcagtggcgtaggtagaaggtggtcagccttgctgggtcttagcagagcacggcaggatctgggtctggggagggcgtgggggtgcccctgccatcacaggagcaggcagagtgggagccctagactcccctctgggcagaaagccccttgaggctgggggcaggtcctgctggtgagggaggggtcccaggggcaggggcaccctcaggctggccgcctagcgattggctcctgcaggacgtggccacgggctccctgggagcagcagctgttgggggtgtctggggagaagacccccatttattgccctgtgagggaccacactgctgccaggggacccttgggcttctgtggcaggacagtgggccgggattggcagtgaggcccaaggagggcaggtggggctggacctgtggctctgctggggagcaggtgggatgtgttaagatgctgatttcagccgggcagctcctccccttcccttcccagggagccggggtgtgcagggccgttccttcccctctgggaagtgcagctcctgtgcaccggagaggcccccgcactgtccctgcccgtcccaccaactgtccctgcccgtccctccactgtccctgcccatccccctcactgtccctgcccattccccgcactgtccctgctcatccccaacactgtccctgcccatccccccctcaccgtccctgcccatccccccccactgtccctgcccacccccccactgtccctgcccatccttgccttgggaggtgctgtcacctggtggagccatgggaagcacctctcccacccagggtctctggttcctgtggcgggtgcagagccagccacatcactgacaccccagctgggttgggtccagctgaccccacacccccacccctctgctcggcctctgcctgtgcccccatccctggccctgcatgaccataaactccttgagggcaggaagtgagtgagtcctacccgcactgagtccctctcacccctccttctcattttggggcggagggaactgtcttctgtcccctgggggtggcagatggccgcttagcttagaaaggaaaacagcacaatttagaattcgtcctgggtgaaaggtctcggcagcatctgcctcctgctgctttctggagtcgcatttccatggagcggccctggcagggagggtgggagtggcacagtggaaatactgaggcgggaacaaagtggtggcggtagaggtggcgggagcggcacagcaggcgccggggccacttggcaccctccccccgcagccctcctggagtccccgcccgccgctcacctgcggggggcccagataggacaggttaccccagcgccgccaggccactgagcgtgggggatgggacaggcaggtgccgggtgaccctaagagggacgcacggaaggggagtccacgggggcacacctggcgtgggttgggtctcctccgtgggagcccgagagctgggtggcttggtggacagggcagctctctcgtccagtcgggggagactggcgttccctatctcaagcctcactttttagccccagaggggtctccccaccgcccctgataggaggagatgcggggacggtggaaggtggggtgcgggtcactcatggaagccctgaggatccccgtgggcgcggcagctgttgggtgccacctcactcggccaagccctggcgcccacctcgcggcccacacccacctggccgccgggacggcattgaagacagagtggcccgggtaccgggggtgtggccagcgccaaagctgtgaaggatttgctcacaggctggtggtcctggccatggccatgctgcaggcctgaggtccctcccaccttctcagggacgtctgggtgctgtgcggagggcaggtgttcgccgtctgtagggtgctccagctctgtggccatgtgggagagaggtacagactggggcgggcacaggctggaggctgcccacagcagcagcgggagactgggcccaaagctgccccccacacacagacccccacacctggctcaaaactttctccaggctcggcccggttccccccagctagcgcgtctcacggaacctccaagccgtggctgtggggccgtggcaggggccttccctgtggtgtccgatgcccaggctgggagtgggggcggacaatgggccctctcagcctgcattcccccacgggagcctcctcaggcctccggctggggctcctgccccacccgctgggagcagctgccgccacgtctgacacctgctcccagccgccctttgtccgagcaccgacgcctgatttatggggcgtgttttcctcttgctggcccggcgtgatacagcctcgttaactgggatgcgtccggttgggcagattctcccacagtcctccacgttggggtccgcgctcagggtggggagtggggcccggtgtccgggcagagtgtcgtggtccattcagggacagccaatgtcctgtgacctcagggcacttggtgggagactgctctaggggctcggacctccagcgtctcccctctggggtcccctaaagctgtgggatgggcctcccctgcccctcctccccgtcttgcccagcaggtgagcttttcccgctccttggagcctcgaggggccgggaggcaggggaccagcttgcatgggccaggctgaggagcctccagccccggctttgatgaccgagcgccctctgtcctgtacccaccccctgccgacttcagcggctgggaaagcaaaaagggccttttctccaagcaggagctgtggccaactcccgcctgacaatggggcatttatgtggagggagggcgcccctcctgtggccacagcccagcccagcccagcctgtgcactccacgggttcccagcggccgctccacctcggggaccggccagcctgtaactggatctgcatgcagtgggaaccacgtctgccctcccaacaggtgcccgcagaggcaggtctgtcgctgcagccccggagtgaccggccacatgggatggaggagggggagcctcattccggggctgtgcccgtcgctcactgggctggcaggagccgtagcaaggcctgagtgaattccccagagcccctttggaaggggtgacatgtgttttctttaagccagttggtttgggacttttggcttctggcaacagatggtcggccagagtggcccttttgcgttctctctacccaagccgtggtcacgggtaaaagccttcggggaagacagatgcctcccgggcctttgggacaggggcgtggctggctgctgagaaacgcacaggaacccccacccccagcctccacaagcccctcggggtaaggcccccccaggccactgccacacatagcacaggtttgattggagacactggggtgggaataagcgggagaggaggcgaggacttggggggccggtgggggtcctgtgggaagccggcagcttcagggccggtcctggggcaggcggccgccgcagccccgcacccaggtgggctctggaaggcgggacggttccctctgtacatcccatctggaggaggccatgcccacccagggcctgagccgtgaggccgctgccttcccgggccgctggggccgctgaggctggtggcatgttctgcttcagaggcttcaccactgggaagagcggcgcccggcgggtcccagaccttttcccggagtgcaaggccaggaggtgactggggccggagatttatgaccacagcaggtggctggggggggcaggctctgcgcctgttgccgcagggaacaggtgagaccaggcctgggtggagatgcaggacccctcccctggctccccttgttctctctgagcccagactgtgtgtccggggtgaggggcagcctttcacccaccttgacggggttgcagagacctggcagagggacctcctcctggcaccttggtttccccggctgtaatgtgggtgcttctgctcctggctgatgtgcctggatgtgagttatgaagactcaatgccgaaagggaaacgtgtctgggggctgagcgtgggcagggaacgggccagccttcatccccagtgcgatcttgacatgagatgtcccatccccattgcagtctcagcctgaggtgtcccatcagaaaggcttcctggccgggcgcggtggcttacgcctgtaatcccagcactttgggaggccgaggcgggcagatcacgaggtcaagagatcaagaccagcctggccaacatggtgaaaccctgtctctactaaaaatacaaaaattagctgggcatggtgtcaggtgcctgtagtcccagctactcgggaggctgaggcaggagaatcgcttgaacctgggaggcagaggttgcagtgagcctagatcgcgcccctgcactccagcctgggcaacagagcaagactcaaaaaaaaaaaaaaaaaaaaagaaaagaaaaagaaaggcttccacgtaggaaggggctgatccacactttccgtggctgccatcatgttgacacctgaaggttggaaaaaccacggcctttgttactgcccaagcaatgcctgttcgctttagcaaagctgggaagaaaagcagataggcctgcagacccggaggctctacggagctaatgcacccggctcctctccatggctctccgtgggtgtagacccagacccctgcccgggctgtggagtccaagctgggttctgctggaacatcctagtctctagcttgttccccaagttagcagtcatttgtcttcttctttctttctttttttgagtcttgctctgtcacccaggctggagtgcagtggcgtgatctcggctcactgcaacctctgcctcctgggttcaagtgattctcctgcctcagcctcattcagtggcattcagtacattcccaaagttgtgcaatcgcggcatgtgtctggttccagaacattttatcagccctaagggaaccccgctaagcagccgttgtgcccgtgcccggggtgtggggggaggcggctgtgcccatgacaggttcccggtgctgagtggcgggggcgctggggaagcaggtgggaactaactgccctggcacatctgccaacagctgtggcggggccttcgtgggcccgcgatgccaggaccccaacccgtgcctcagcaccccctgcaagaacgccgggacatgccacgtggtggaccgcagaggcgtggcagactatgcctgcagctgtgccctgggcttctctgggcccctctgcctgacacccctggacaacgcctgcctcaccaacccctgccgcaacgggggcacctgcgacctgctcacgctgacggagtacaagtgccgctgcccgcccggctggtcaggtgagggaggacccacagcctgaggggtgggcagacccaggcccgccgccagctgcccaggcaacttgaggtacttggcgggatccaggcccgggtctctgacccggaagtaattgggagcccctgccccagggtccctgcccccctcccagacctggaatcgcctcgttttcagctgcttgctctggcccaactcttgctgtccccgcttctgcgagacaaggggagcctctgtgtccaggccgcccctgcccccttcctcctgccgtgcactggccctcacctgttagggtgaagggtgtctggaggtgtcagctctgggaagagacggcccaggctcaggcctcttgggagctgtggtccttcatctgccaaaggcgaccggtctcacggcaggtcctgaggatcaaatgtgatagcacctaaggtggagcccaggctggcacctccaggtggcctgaagggagggaaggcccggcctcggggagcagtgaggccagcacgaccctcttgtccccttgtctccagggaaatcgtgccagcaggctgacccgtgcgcctccaacccctgcgccaacggtggccagtgcctgcccttcgaggcctcctacatctgccactgcccacccagcttccatggccccacctgccggcaggatgtcaacgagtgtggccagaagcccgggctttgccgccacggaggcacctgccacaacgaggtcggctcctaccgctgcgtctgccgcgccacccacactggccccaactgcgagcggccctacgtgccctgcagcccctcgccctgccagaacgggggcacctgccgccccacgggcgacgtcacccacgagtgtgcctgcctgccaggtagtgctgcccgctggccggggtgcacgagcccctccccggctgccaggcccagggggtgggaacggggcgcctggtgtaggggcagccctgggagggcccatggcggggagttgggaaggcgggatggcgagttccccagactgcgtgtggtgtcggggggacgcgtctggagcggggtgtgcgctgggaggaggcttgcacagggtccaggtgccagcccgtgtctctggagtttcccggaactcacattcgagctgtaggacgccctgcctccccccagtgcaggcaccctgacttgcgcaacccccagggtttcccctgcagtggggctggggccggagagggcgtgggagctgcgggggcaccatcacttcccaagccatggcccttcctgccatcctgctggtctcctgcgggtgtgggtgacaggtaggcgcagccgcctgcccgtgtccccagtgctccccgatccccgtgttgtacataggagcctctctgctgtagttcttgtttgagtaaattttgcagcagctctaaaaataaggaagagttttgaaaacctccagtctcggccgcgcgtggtggctcacgcctgtactcccagcactttgggaggccgaggtgggcagatcacaaggtcaggagatggagaccatcctggctaacacggcgaaaccccgtctctactaaaaatacaaaaaattagccaggcatggtggcacgcgcctgtagtcccagctactcaggaggctgagggaggagaatcacttgaacccgggaggcggaggttgcagtgagccgagatcccgccactgcactccagcctgggcgacagagcgagactccgtctcaaaaaaaaaaaaaaaaaagtgaagagaaaaaagaaaacctccaatctcagctgcacagaatggctgttaggtgggaatggggagagggcattcaggcaggggtggggctggagggtgcacagggtcctggctgacccacgggtggcccaagggctgccccacccccttggaagccccaagctggcctggcccctgcaaaggggaagctccctggctgcccagtcagctgagcccagccacctctgcgtgcagacaccagacgtgtgcgtttcctgcaagtcactgggcgagcgtggggtggggacagacactccctggccagcttggatctctgcagggtggggcgcagagcccttctgctggtgggggctcagatgccttcctagcagcacgggaccctacctccagtcacacggattgaggggccaagctcttggggggccgtggttcaggctagggcaggtggggtgtgtgcggccttgtccaaggccacctgtgtgcagagctgatgcccacccgccttgggcagggtgggtgaggacctcctggtgaggcccagcggcagagatgccaggggtgctgggccggctcagagccactgcccgtgcaggggcagctcagggccctggggagtgggcagggagggaaggggaggggctggtggggttcactcacttgagtgtgggtagatctcagaggctggggtgctgggggctgggtcacccgtccggtgaggggtgtgctcactgcctgctgtggagtctggccgtttcagggtgagatgaccatccgggggcctccccaaatgactcaggcctgccagaccccagcttcagactgtccccggcggcccctgcacccaggccccctgaagggccctcagccacctctgggtggtcaggagcccaggagacagctgtgtgtggagtcacggggaaccgagatgggggcggccctgagctctgcaggcccgggaactggctgggatttggggtcgcacagcctgcctggcacgtcagcactgtctcctcgtggggtcgctggccgaggctacgtcgcagagggtccagctggggtccacggggctctcgctggcttcccgccctctcccccactgtgtgcctcagccagtgctttgcagggcagccctggggtcgcaggcccagccaggggccccatctgcctaggagccggggtgcagggccccacacatgagtgggaccgggactcaggctccaggctctgaattttttttttttttgagacaggtctctgtcactcaggctggagtacagtgacgtgccctcagctcactgcagccttgacctcccaggctaaagcgatccttctgcctcagcccctcaagtagcttgggaccacaggccggcgccaccacgctttgctacttcttgtatttttttttgtagagacggggtttcgccatgttgtccaggctggtcttgaactcctgggcgcaagcgatccacccacttcagcctcccaaagtgccgggattccaggcgtgagccaccgcgccagggctggggtctggttttgggtgctccccaagctgatttgcattttggattttggttgtctctggctgtctgcttttgctccggtccagcagacagacagaacggacggggtggtggcggtggggcagtgtctcagagggaggggccgagcaggtgggagctccaagggcaacgggggttcaaaggcatctcgggagggcggcaattagtaaccggctgcaggtttggctgttgccgaacgcgcctttctgggttgatcattgaaccagcgggagttgagtggattaatagctaactggctgccttggaggcctgggtggggccatacctcgggggagggggccctggcagcctgtggaggaggagggggaggaggaggtgggcaccagagctctgccccagggaggatgggccatctgaatctctgcagcttccctggggctgcgaggggcccaccctgccccagccagcagcctgctggccccatgtccccctgctgctcagagcccaggccccagtgtcagcccctgaagatggggtatgcggcccccctgtggagacattgtagggagctctgagcatgcaggcggcacccaggtgcaggagctgccggaacctcttaaaagagacccaagggtttttgtgacagaatcttctggaaccctgtgttcctgagtccctgtttagccagtcctgtccaaaatgattctttcaagcagggcgtgtccctctgggcactggagtgaggcaggggacgggcacagaccccgggggccccagggcagggccgtggaggccaggctcttgtgtccagagcagtgtgtcgggggtccaggcaggagccggactggacctcagggaagaggctgacccggcccctcttgcggcaggcttcaccggccagaactgtgaggaaaatatcgacgattgtccaggaaacaactgcaagaacgggggtgcctgtgtggacggcgtgaacacctacaactgccgctgcccgccagagtggacaggcgcgtatacgggtcgccgcagggcggggtagccggggcggggctgctacccacttactaaactgcactcacaggcatagcggggagcagccgagaccctgtcccaggccaggcagactagggttggccgagaaggacaacatgatgggggccccacttcccgtggccagggtctggtgcccctcacctcgggggtcagcacagacagggccctggttggtctgtgtgggccgtttgcaacctggctccaggcagcccctgtgcccagtggggtgtcctggcattgagggccttcagcaccccactcaggccacgcttcctgggccagtcacagggatgcctggatgaacagacaggccctgtgttcgggaattaccctctggtggggtgacgggcaaaggtgcaccccgacgcagcagtgtccacagagcacaaagaggaggcaagactccatggtgctgggcctgcagaggaaggagtgatttaggctggcggtgggtggaggagtcagcccaggaaggcttcctggagggggcggcattgccaccctgcgtcttaggggacagggagctcagggagtggcagctgcccggggccgacagctcctgttccctgcaggtcagtactgtaccgaggatgtggacgagtgccagctgatgccaaatgcctgccagaacggcgggacctgccacaacacccacggtggctacaactgcgtgtgtgtcaacggctggactggtgaggactgcagcgagaacattgatgactgtgccagcgccgcctgcttccacggcgccacctgccatgaccgtgtggcctccttctactgcgagtgtccccatggccgcacaggtgagtgccttgaggcccaggtgggcgcagggggctcacatgggccaggcctgagctgtgtgacctcacccagggactgtggccctcctgcacccaggataacctgaaagggcctttctggtcagggaggccggtggtcgctgtgagtcccccggaacatcccaagtgtcacgggatgcccgacggggtcacggcgggcagctcctcctggggtgtcagtggggttggaccccagccgtgggtggtgtgccatgcctggcccaggggccgtgcccactgaccgccgctgcctgcccaggtctgctgtgccacctcaacgacgcatgcatcagcaacccctgtaacgagggctccaactgcgacaccaaccctgtcaatggcaaggccatctgcacctgcccctcggggtacacgggcccggcctgcagccaggacgtggatgagtgctcgctgggtaggtgccagcacagggggtgcggccaggtgggggtggcagcctggccccagaaccgatgagaagtcgattctggcttcagggggtgcccagttagatgggggatgggaccctgccagtccgatgggggtggtgtgcagtgaggtgttgcaggggccagggtgcctggagcagcctctcacccgtgtgccctcgccaggtgccaacccctgcgagcatgcgggcaagtgcatcaacacgctgggctccttcgagtgccagtgtctgcagggctacacgggcccccgatgcgagatcgacgtcaacgagtgcgtctcgaacccgtgccagaacgacgccacctgcctggaccagattggggagttccagtgcatctgcatgcccggtgcgttggccggggccagggcgggaaaccgagtcgaggctgggcagccttggaggggcagccccgggaacatctgtgggttgcttccgctttccccagcctccatgccttctgggcccacagcctgcacggggcatggggaaactgaggccaggccacagggccagcagagcacgggggcagtgctaggcagatgagggtgccgggccaggggccacgggctgcaggggagcgggtgcgcagggggcccgtggtggctgggacactgggctggaggcagggttcgtttctgtcccaagtccacagctgtgcccagtggggcactggggccgcgcgtgcccccctcactgttgccccaccccacaggctacgagggtgtgcactgcgaggtcaacacagacgagtgtgccagcagcccctgcctgcacaatggccgctgcctggacaagatcaatgagttccagtgcgagtgccccacgggtgagggccacccccgccccctgcccccgggtcgtctgcaccctggcctcctgaggggtgcctgggcgtgggttgtgtcccctgcccccgggccatctgcaccccggcctcctgaggggtgagggccgcccccaccccctgccctcgggccgtccgcaccccggcctcctgaggggtgagggccgtgggttgtgtcccctgctcctgggccgtctgcaccccggcctcctgaggggggcctggccgtggattgtgtcccctgcccctgggccgtctgcaccccggcctcctgaggggtgcctggccgtaggttgtgtcccctgcccctgggccgtctgcaccccggcctcctgaggggggcctggccattggttgtgttcagattcccaggagagcgagggttttgcctcatgagtggatgggagtgttttcagacttccccgaaggaagggcagggcccagtggggagtgggagcttgcccaggggtcgcggtggagcccagggccaggagatcctccttgatctgggtgcagccccttctgcctggagagaagggtataccaggagctgcagtgcccagacagggaggaggctccagcctggctttctgagggctcgaggctgggagggaggccagcctgccctgtcctgccatgtcccctgcccaacggcacgccagcgacaagggtatgcagagaaccacgtggggcaggttggcctgcaatggagatgatggctgcccggggcggacttggaggaactctcaggggcctgggtgaaaggtgtttccatctgtcccagagctgggggccggggcgcagagcccagggaggcgttgccagcccaagcctaggctcccaagacatagattacccgtcccagacactggagcgaggggagccccattctcagcccggctccactgtagccatagcaacccagtcggtttgggaaaaaggccccttctgtgggagcgagggcgtgtggtgctgggggaggggctttgatccggggagcgggcagcgggaggcagggagagctggggctggctgagctcaggctgagtgtgccctggggagcccagccaggcgctcactgctggggtctggccaggggtccctgaagggccatagcgctgttgcacatgactccctcccctcccctccccggccccaggcttcactgggcatctgtgccagtacgatgtggacgagtgtgccagcaccccctgcaagaatggtgccaagtgcctggacggacccaacacttacacctgtgtgtgcacggaaggtgcgggccggcgcccaccagcggggagggactggggacgggacagggcactcagggcagtgaaactgacaaggtcatggacaccttggtctgggccacctggtccagaggccgagagcacagctcagccccaatcctgagtaggtgggaatgccacgctcggagccctcctcaggttggcacaggtgaccccaggtctggtcatgggtgtcccgggggccgccagtcctaagtcttcctgtgcccgcccctcccacggtccagggtacacggggacgcactgcgaggtggacatcgatgagtgcgaccccgacccctgccactacggctcctgcaaggacggcgtcgccaccttcacctgcctctgccgcccaggctacacgggccaccactgcgagaccaacatcaacgagtgctccagccagccctgccgccacgggggcacctgccaggaccgcgacaacgcctacctctgcttctgcctgaaggggaccacaggtggccggccaggcgggtggccggcggggggccagtgggcagggcgggcctgaggactgaccgacacgtgccaccccttcaggacccaactgcgagatcaacctggatgactgtgccagcagcccctgcgactcgggcacctgtctggacaagatcgatggctacgagtgtgcctgtgagccgggctacacaggtgagcggccctgcacgtgggggctgactgcactgtgctcagaggtcaaggtcagccactctgccctggggctgctgaggggttgggtgagggctttggtgctgcccacctgggcagaccgtggtctgcagcagagattgcagcgggaccagggctataactggcagcacgatgggtccccccgacccctcttgtctccggtcagagctgtcccaggccgtgttggcagagtggcccagcaggccaagagggagcagccagccctgaggccaggcttaagtaccttctgcctctgtggctcaccagcacctttgagcaggtccctctgcctctctgggcctcagattctcatcagtcagggctgcagtagcccctgcccctggggcccctgggaggatgacttgagtgggcactggtgcccggggaggctggcacatggcacattgtgatccaagatggtttctgacacctggaaggatgtggccagaagggtgatcgccccggctcaacagacagggaaatcgaggttgacgtgggtgggaccccctgggcgctgggcctcggagtctgacccgccctgcccttagggagcatgtgtaacatcaacatcgatgagtgtgcgggcaacccctgccacaacgggggcacctgcgaggacggcatcaatggcttcacctgccgctgccccgagggctaccacgaccccacctgcctgtctgaggtcaatgagtgcaacagcaacccctgcgtccacggggcctgccgggacagcctcaacgggtatgcggcggggccgatcatggggacacatcagtcctaaaccctgggagctctgctgccaggagggtggcacctgcacagagcttgagatgggccagaaacgggcctcggacggggctgggtggcagggagctcccctcggggacgcacatgcctctgggtcctcagtcagactacagtccacacccagcagctgtgtgctgcgcgtccttgtgggctgcatggtgtgctcaggacacaggcccacagtgaccctggaacacgtttccatggtaacagccgcaagtgtttctgatgcccatgatgtgcctggcagcactctgcctggatgggaccatttaaatcagcagggaccccattgccctcatttggcgcagagaaggcacgtgctttgttcggggccacacagcgggcaagtggtggggggcttttcgcagcaccctactgccctgcacttggcatggtcccctcgctaatgaaccaaacccctgccgcagtcttgggtatgggaagcgctgcggcccccacttttttctttattttgagacagagccttgctctgttgtccaggctggagtgcaatggcatgatctcagctcactgcaacctccacccctcaggttcaagtgattcccctgcctcagcctcccgagtagctgagattacaggcatgtgccaccacacctggctaatttttgtatttttagtatatatggggtgggggagtttcgccatgttggccaggctgatcttgaactcctggcctcaagtgactcagccacccccgcctcccaaagtgctgggattacaggtgtgagccacagcgcccagcctgcccccactaaaggactctgcgagtctgagtggatgggcacctccgccagcccatagggcattgcagacccgggagtgcccaggccccggccgtgctgctcgggcctccctcgacctgcagtgtggtcccccttgcaggtacaagtgcgactgtgaccctgggtggagtgggaccaactgtgacatcaacaacaacgagtgtgaatccaacccttgtgtcaacggcggcacctgcaaagacatgaccagtggctacgtgtgcacctgccgggagggcttcagcggtgagtgggctgcgcgtttctcagtgcagagggccgccctcgagtctggggagctggagacacaggatcgggacccaggtccagccagcaccatgcatggtgtctccctcccgtggcaaagccttagctccaggcctctggctcttggagatgaggaggggcctggggtggggagcaggcccagggctgctgttgtggggccctgccaaggtgcctgggagtgctggacatgccgagtgctgtccccttccctccaggtcccaactgccagaccaacatcaacgagtgtgcgtccaacccatgtctgaaccagggcacgtgtattgacgacgttgccgggtacaagtgcaactgcctgctgccctacacaggtgaggggtgggtggggcctatgctggagggggcggggcctatgtgggaggggcgggacctgtgctggagagggcggagcctgtgctggagagggtggggccaggggtgggggcggcctgggaagccgtgactggagggtaaagtggtggctttcttggggcggggccttccagaaggttctgcgcctcactgagtgccttaggcccctgcagtatgtgggccttctcccgggggtggggttggcagattagcaaagatacaggatgcctgggagaaaattttcatgcaagcatgtgttttacctggcaagcctgccgcaagacacaggtaagatgcaggtgaatccttagcagggccgggcctgggtcactgggctccgtgctcccggcgcccaccctgctggggtctctgggggccgggcttccccacccccgccagccggacctgagggattcctttgatggcgggctctctttgtgtgagcggaacaaggagccctctgtttgggctgagcggggagggggatgttcccccaactgtccagcccctgctatgaacccagccaaggggatcacaggaaatgatctcctctagaaaagacaaagaagagtccacaagcaccggggtcctggcgctccccaggagcgggcagagggtgctgccacggggcctggtcagggagggcctgcctgggccaggcagccgggctggaggtcccacgcctgcggttcccatgacatccagcagcctgtggccagaacgctgttttctttgaccgaagttaaggacctgggttttctctcctgtgtcagtcagtgaggaccctccctccacggctgggcgcccctgtccctttcagacacgtcgatcgggccggcaggaggagcggcggtgctgacccgcttcctatctgcccgcttcctgcttcctttcgcacaattgtcggaaactctggcgcagttcctgcctgcccgggtcaccgtggaaaccaataggaagagaggccctggaaagtcgccccagcaggccagggagataatgggggacagggaagataacgcagtccccacggctataaacaggaagctcggccatgggcttgtgcagaaaaaggccctcggctgtgcacgtggttcctacatagcctttgccagacaccctgcgtggccctggaggtctccaggccgtgccccgtgccccgacacgcaggatgtgctgggggcctgggcctgtcccctccatcgcagcccttgtttgttggcctcccgtgatgggcgtttgctgcctgtgacacggagccccaggattagtttcaggcctcggtctcaggccagggcctttcctcgtcacccagagatgagggggcttgcgtccggggtgggcccaggtccctgcagtgtcgtggagcccacccgactgaggccgcctctcctggtgcagtccttgttcctgggcacgcctggtggggtgaggcctaggctgtgccccgctgccaaccgggaatgaggggtggcttctgagcgtgacatttgtgcagcttgtcttcagcgtccccccatctgtgctccactcctccctgggtcagggtcctggcacagccgggagcgctcaggggtctcggtgcacatttgcctcccggcgggaccagcagacggcactctgatggcggaaagaccagcaggcggtggccgatttgggagatccctctgggtgaggctcccggggtcacgtgtgtctccttcccgcaggtgccacgtgtgaggtggtgctggccccgtgtgcccccagcccctgcagaaacggcggggagtgcaggcaatccgaggactatgagagcttctcctgtgtctgccccacgggctggcaaggtgaggctggccagggcccggtgagggctgggatgggaggtcaggatgtctgcgggacacaggcagctcccaggcaggctagatgagtctttgaagaggagccggtgggtgctgaggaggccctggtcagagaagttctggaatcaggaattgacctgggagcaccgttcccaactccagttcctgtgaccttcttaggccaaaattaggggagaggggatggtcctggggtcacggaagcccactcctgggtcgggagaggcactgtaggtgggtgggccagcctgggaagggcctggagggccaggggccgctggtgaccaaccggcctcctcctgccccacagggcagacctgtgaggtcgacatcaacgagtgcgttctgagcccgtgccggcacggcgcatcctgccagaacacccacggcggctaccgctgccactgccaggccggctacagtgggcgcaactgcgagaccgacatcgacgactgccggcccagtgagtagccccgcggctctggcctcctccaggaagctctcaggcctcagttcccccgggcagggttggtgcgcatggtgctggccataagcacccagggaggccggagtgtggccggggagggttgggtcaggtgtgggggatgtgctgagggatggccagggtggttcaggagggccccagagccggcttgctcctccctgcacttcgcggaagagtcacgagagcccctcccacggctcttcactgagccgaggatggctcgggcccggcctgcactcccgcctggctcatcgggccccgctgcaggccagggctctcaggcctcccagccctgcttcacagaggttgaggttggcagaagccgggggtcttgctggcatcacctggcaggcagaggcaagaactgtctctcctcccctgctcggtctgtgaagcctgcaaagctgccccctgccctggagcttgaggacaggagcaggtggggagagagaccccaagcacaggagacgggtgtgacgcagcctgtgggtgctggggctccccaccagacacctttgtcacagggctgcttgccgcagcctcggcaacgaaaggctgggctgtccccagccatgcagccttcccggccccctcccgcaggtgtgggtttgtgcctgcccctcacactcacccttccgtcctctcccagacccgtgtcacaacgggggctcctgcacagacggcatcaacacggccttctgcgactgcctgcccggcttccggggcactttctgtgaggaggacatcaacgagtgtgccagtgacccctgccgcaacggggccaactgcacggactgcgtggacagctacacgtgcacctgccccgcaggcttcagcgggatccactgtgagaacaacacgcctgactgcacagagaggtgtgcggggctcgagtgaggccgtggaagggaacgggcggtgcgggccacacgcagtagctggcagcctggcacaccatgcaggcgtccgcctaggccggctgggcacttagcgctggctgcattgagtccagacattgttcattgtaccgacctgtccctcctgagagggccattgtgacctcctcctgtgtcccgcaccaggagcgccggtagtctgtcctgaagaactggtgcgcttccttctattagacaacgagaactctgtccgttcttgtttcctttttgccgtgtttgccaggaagctcatttggtaaacgtcagtctcgtccctggtttctgacgtaattacctcccgtgttaccaggacggtttctggtttctccctcatttactttaaccaccctatgcccacgcgtttggtaaaaccactctcgacctgacttataaagaaagcaggggagggaggtgtgacgtggtgtgagagccgggccccgggttcccactggcctccctgggtcagccaggctgccctgggcctgtcctggccatcaggcccctagggttgagcagaaggggaggtgctggcgaggcagaatctgctggagcggggacccaccaatgccctccgctcagcccccgcctgcccacccccttgcagctcctgcttcaacggtggcacctgcgtggacggcatcaactcgttcacctgcctgtgtccacccggcttcacgggcagctactgccagcacgatgtcaatgagtgcgactcacagccctgcctgcatggcggcacctgtcaggacggctgcggctcctacaggtgcacctgcccccagggctacactggccccaactgccaggtgagtgcgccggccacagaggtgcccgaaggaggggccctgggtgggtgcctgcctgcgggaggtgggaacggtcacccccaggtcccactgtgtcggctcggggtcacccccacacccccgggcagagggtttctggggatctgagcagccggtgaaggaacctgatgcggaagcagcaggcaccttcgtttcaatcccaggtttctggagccggggcgggagctcaggaattggggaattgaggaaaagtgttccttctagcaaaggccgagggtggtctggacctgctgagggccctgagggagacccagcccaggctgttcctggtgtgggggtggtggggagtccaggggcggcagtttccacttctgtagaatgggttgcagcctgggttggagtaggccccttggcggatgtgcgttctgagctaccggggaaatggccggggcgcgggcacccagctgaccccaatctgtccccagaaccttgtgcactggtgtgactcctcgccctgcaagaacggcggcaaatgctggcagacccacacccagtaccgctgcgagtgccccagcggctggaccggcctttactgcgacgtgcccagcgtgtcctgtgaggtggctgcgcagcgacaaggtaacctgctgtgcccacccggctcgggtcccagcccatcaaggtcctctgtgggcctgggcctcacctgtctaccaccccatcccccgcaggtgttgacgttgcccgcctgtgccagcatggagggctctgtgtggacgcgggcaacacgcaccactgccgctgccaggcgggctacacaggcagctactgtgaggacctggtggacgagtgctcacccagcccctgccagaacggggccacctgcacggactacctgggcggctactcctgcaaggtgggggtccctcctagggtaagggttgtggccggcacgagtgttgccacacaccaggccctggctgggagctggcccagtggagaaaactgaacctgataggcccatgcactgttcagtctcattaggggagggctggggtaatcagggtagactgcctggaagaggtggcctgtggaaagcctgaaggagggtacctatactgagaagtgggatggggttttcccttcccctagattgtgtctgggcttggccaacacctaccctgaggccctcacctctatcctatgggacggggtccacccacccccaacaggcagtgactccggtcaccgaggccccgccagggtctgttgggctgggtctctctccaggtctgacaggagcgaggggcccgtggcttcgctggacctgagggcagctcatgtggccctgtcagccctcacagtggggtgtgggagcactgcatcctggcgccggctgagccgaagggcccctcgttctgtcgcctgcacagtgcgtggccggctaccacggggtgaactgctctgaggagatcgacgagtgcctctcccacccctgccagaacgggggcacctgcctcgacctccccaacacctacaagtgctcctgcccacggggcactcagggtaagggccgctgcacggagggctggtgttggccatccatggccagggcaggggcagggcaggcaccccgggaccggccagaggcatccaggaaccagccagaaactcccgttttcctgtgtgaggccaaggccgactcacagctgcccagggaaagggcccagagcgggggtcccagtcggaagggcgtctccacggcacccttgacacctgcctctcccgagtgtccgtgcagccccagacctgagcgcttgtcttccgggacggacacgcggcacggcagggccggggtgtggcgggcttgggccactgacgaaacctggccccgcaggtgtgcactgtgagatcaacgtggacgactgcaatccccccgttgaccccgtgtcccggagccccaagtgctttaacaacggcacctgcgtggaccaggtgggcggctacagctgcacctgcccgccgggcttcgtgggtgagcgctgtgagggggatgtcaacgagtgcctgtccaatccctgcgacgcccgtggcacccagaactgcgtgcagcgcgtcaatgacttccactgcgagtgccgtgctggtcacaccggtgggtgccgcgcccaggcgggtggggcgtgtggggcagcagggtgagcctctcactgccctgctcttacccctagggcgccgctgcgagtccgtcatcaatggctgcaaaggcaagccctgcaagaatgggggcacctgcgccgtggcctccaacaccgcccgcgggttcatctgcaagtgccctgcggtaggtgcaggggtgcagggaggcaggggcccgccaggggagacacctggagaggtccacgtgggggcctcggggcgcagaccgggcagtgatcctcccggccttcatcctcctcctcaccctgatgtcttttttttttttttttagtttcaataaatgattttagagacattttagatttatagaaaaatggagcaggaagtagactccctggggtggctgtcccctgcacgcagttcccctggttagcagcttgcatcaatttcactctggatttcagtgatacattgttaccaacagcagcccttcctgtacctggggcttgcccttggctttgtggttgtgggtttgggctgaggtatgacatgcctgcccaccctcgcaggatcacggcagagagtccctgccctaaagtcctcagcactccaccagtttaccccttcctccatctcccgaccccctggcacccccgatctttctctgttggtagaatgtgtgtaaagggttttgctgctgggggcaaggttgcaggccgcctcccaggttagaggagagcggtggcactgctggccgagggctgggtgtgaggtggcgggggggcggggggtggcccaccccgacaccgtcctgtcttccctctcgggcagggcttcgagggcgccacgtgtgagaatgacgctcgtacctgcggcagcctgcgctgcctcaacggcggcacatgcatctccggcccgcgcagccccacctgcctgtgcctgggccccttcacgggccccgaatgccagttcccggccagcagcccctgcctgggcggcaacccctgctacaaccaggggacctgtgagcccacatccgagagccccttctaccgttgcctgtgccccgccaaattcaacgggctcttgtgccacatcctggactacagcttcgggggtggggccgggcgcgacatccccccgccgctgatcgaggaggcgtgcgagctgcccgagtgccaggaggacgcgggcaacaaggtctgcagcctgcagtgcaacaaccacgcgtgcggctgggacggcggtgactgctccctcaacttcaatgacccctggaagaactgcacgcagtctctgcagtgctggaagtacttcagtgacggccactgtgacagccagtgcaactcagccggctgcctcttcgacggctttgactgccagcgtgcggaaggccagtgcaagtaaggctgcggggctcatggggctgagggaggacctgaacttggatgtggcctggcttgggcccggaggccagcatgcagttctaaggctctgctcagggggtgcagggacgtcccccgtggctggccagtgggctggaggcaccggacggcgggtgcgaggccccccgaggaaggcggcctgagcgtgtcccgccccccacagccccctgtacgaccagtactgcaaggaccacttcagcgacgggcactgcgaccagggctgcaacagcgcggagtgcgagtgggacgggctggactgtgcggagcatgtacccgagaggctggcggccggcacgctggtggtggtggtgctgatgccgccggagcagctgcgcaacagctccttccacttcctgcgggagctcagccgcgtgctgcacaccaacgtggtcttcaagcgtgacgcacacggccagcagatgatcttcccctactacggccgcgaggaggagctgcgcaagcaccccatcaagcgtgccgccgagggctgggccgcacctgacgccctgctgggccaggtgaaggcctcgctgctccctggtggcagcgagggtgggcggcggcggagggagctggaccccatggacgtccgcgggtgagtgagacccggcgcccacggtcaatccccgcaactctcctgggccctccccgacggcctccctgcccctcacggccggcgccatggcaagcagtactctccccactttatggtaaaagagacggaggttccgagaggacctgggacttcagggcctgcgcaggcaaggagtagaggcagcattccagctcagggccctgaccccacagccacacccttttcctgggccactgccttcccctggacaggcggcactcctgtgcccagtaggtgattttgagattgagctgtgccttaggcactggatactacactgattaaaactcagccctctgccaggcgaggaggctcacacctgtaatcccagcactttgggaggctgaggcaggcggagcccttgagcccaggagttcgagaccagtctgggcaacatagggagaccttgtctctgtttttttaaaaaaagtattaaaagaagtaaaaaacaaaacactcagctctccaggggttcccacagggctgaacagccccaccccagacaagaatgccgcttggtcatggcgtctgcctggcttgggctggagaggaggcaggtggaggtcctgggagggggcattgctgggccttgcagttggaggaggagctggtgggggtggggggtcccacggtgggagaacacaggcaggagcagcttgagtgcagggggcaccccacaaggctcccgcccatgcctactcgatctggggcagctggacccaggagccaggttggttgtgcccttcgtgtgcctgaccctggtgggtttgcctgtcagttctgctggcttggagcaatcctggaggtcagaagcatcatctcacaggctggatgggatcctgctcacgggaacccagtcctggggagcagagctcacccccagccagcctcaccacacagcccaccaccgctgcacccacccccacctcacgcctgtgcttcctgcagggcctggggatggctcctgggggaggactgggctcctggcacatactctgtcctgagatgaggaaacgtgtctgtggcaccagcaggagccagagagggtgtcagggcgggccagggagagcgcgttggtgggtatctgggatgagccgtgatcagcactggccggagtcggggggctggcaccagtcccctgcagggtagctgctgtcagacctggcttcccaccaccccaggctgcctcaccatgtcctgactgtggcgtcatgggcctcagtgtcctgcggcagcatccctggccggtgggcgggggaggaggaagcctcgggtcccagcccctctctgattgtccgcccagctccatcgtctacctggagattgacaaccggcagtgtgtgcaggcctcctcgcagtgcttccagagtgccaccgatgtggccgcattcctgggagcgctcgcctcgctgggcagcctcaacatcccctacaagatcgaggccgtgcagagtaagtgtggccccatcccgggaacaggctctgcctgcagggggtgccatccccccgtgccccagacacgctggctgtttgtgccagttgctacccacgggtgtgagcgttgccgtccgagttggggtagggcttttctggaattttctgaatggcactccgcccccacctgcggcggtcacagctgccggtggagccacctgggaacgagtccagccacgggaaagtgggtgcctgcttctctccccaccctttcctcctgaattttctttgttgggtattatttcaaaatcattacggctttttttaaagaaaaaaaaagagagagagagaagaattgatcggtgtcatgtgaagtgttgaagtttgtatcttgaaaatccctctaaatcctttgtcttaacagctcagtgcgagtgcagcgatttgaagttgactaatcctccttccttaaaggagaaaaaagtaaaagccgtctccagatagagtcggctggtgcaggagagaatttagcgatagtttgcaattctgattaatcgcgtagaaaatgaccttattttggagggcgggatggaggagagtgggtgaggaggcgcccggacgcggagccagtccgccgccccccggccaccagcctgctgcgtagccgctgcctgatgtccgggcacctgcccctggcccccgtgcccgcaggtgagaccgtggagccgcccccgccggcgcagctgcacttcatgtacgtggcggcggccgcctttgtgcttctgttcttcgtgggctgcggggtgctgctgtcccgcaagcgccggcggcagcatggccagctctggttccctgagggcttcaaagtgtctgaggccagcaagaagaagcggcgggagcccctcggcgaggactccgtgggcctcaagtgagcggacgccgcccctgcttctgggtccccagtgggaggtgggacctggccgagcatcctcaccgggagtctgcccctcccgacccagggcccacctcccacgccaggcccgggccaggggtctctgggggcttcctagggagctcgctcagcctcacttctcgacccctcaccccccaggcccctgaagaacgcttcagacggtgccctcatggacgacaaccagaatgagtggggggacgaggacctggagaccaagaagttccgggtgagtcgcgaggctcccgggctcctgggctcccgggcacctgccgccgggctgccctgacaggctctgctcactccctctatgtagttcgaggagcccgtggttctgcctgacctggacgaccagacagaccaccggcagtggactcagcagcacctggatgccgctgacctgcgcatgtctgccatggcccccacaccgccccagggtgaggttgacgccgactgcatggacgtcaatgtccgcgggcctggtaagggtgccagcagccagggcttccctagccccgtggcccacctgcctctctcccctaagccccgaggctggggtacagttgatactctggaaacttagaattgggggtgagagctttcatccttggggtgtttcccattcagagtagacgtgggggggtcctggagtcctcctgttcttccaccaaccccttcctggggtgataccgcagggccactctgtccctgtaaattactcttttctgaaaccttcttgagacatggaaagcgttgattttctttttcttttttttttttctttttttttgtttttgagatggagtctcgctccgtcacccaggctggagtgcagtggcacgatctcggctccctgcaacctccacctctcgggttcaagcaattctcctgcctcagcctccccagtagctgggactacaggcgcctgccaccacacctggctaatttttgtatttttagcagcgatggggtttcaccatgttggccaggctggtctcgaactcctgacctcaggtgatccgcccacctcggcctcccccagtgctaggatgacagcgtgagcctccgcatcctgctgaagcattaattttctaactgcatgcttctggggtcctctttttcctgggtggattttgggtgccaggtcttgggcaggtcaggaagcagttgcccgccaggagtttaagctggattcggctctgtccactgagcagcccaggcggacttcagctgccccttggtggctgtgtgcacggggccaccaagtgctgggtggtgcatccacaccgtggccccttgagcttggggctgctgcccccctccccctgggctgcagctggggaccggccctccagactgagcacccgtctctgcctctgcagatggcttcaccccgctcatgatcgcctcctgcagcgggggcggcctggagacgggcaacagcgaggaagaggaggacgcgccggccgtcatctccgacttcatctaccagggcgccagcctgcacaaccagacagaccgcacgggcgagaccgccttgcacctggccgcccgctactcacgctctgatgccgccaagcgcctgctggaggccagcgcagatgccaacatccaggacaacatgggccgcaccccgctgcatgcggctgtgtctgccgacgcacaaggtgtcttccaggtaggcagtggctgcctgtgtgcccacctgccctcctcagggccgcctggtggtctggggcagtggccaggcttacgtggccctgggagcctgaccccgagcacagctgagtccgggacaactggtgcctccacctgggaccttcgcagtcagcgaggtgcgagggggagggcgtcgggcccatctgtgttctccagggaagtcaggcagaggcgggtctggcaggaggcctgggggatctgctgagtgaggcagcacctccccacccccagcaaaacaggctccatcagggttgtgggccttgctcaaggtccaggttccactgctgcagcccctcgcagccccgcccctccctcaaccttggctgccggcgtagcctgtggcagtgagaagcagggtttagaggctgccgctcggtgcctgcagacctagggctcagcttgccggtgagctcgtggcaagaatggatttagggatttggatgcctgggtctccagggagtgtccctggcaggggctgcctttgcagtcacccctgctgcgagtccccaggctccaggcggccctggagcaagcaggttcagatgggcacagcccggggagttaccacagagcttctcatttcctgatttcttagctcaggtgacacattgtcatctcgcagaaataaatgtaggtgagcagaaagagcgtggaagggagccccgtgcgggtttggtgtgtgcctctctcagctgccttctttgcacagatgtggaagttcccaggtgctttgcaggaatcaggccaagttgccttttgcacccgccagtgagcaggggccattcctcctgccagatgccaagacccggctgcattacaagggctgcccaccccctctctgggcagagccggacactagctcggcggttctgagacggctgtagggccgtgagcccggcttcctgagtgccagctgtaaccgccgttgggggcagggacttgacctctctgttttgtaggtggtcatggcagctaggaccacagtgaggattaaatgaggccacacgtggtcacgatggatcccactgtcaccaaggggcctgtctgtgggcagcacagcccctgcccccatccgggcccctcctcaggggcagccccatggcgtttcgtcttgcccggccgtgccgatctcaggagggtctcgtctgtgtccggaagacagtggggcttcccgtccaggcgttcgttctgggcaggaggcatcggtgtacgtctgcccagcacccgcctgagcctctccctgttgcccagatcctgatccggaaccgagccacagacctggatgcccgcatgcatgatggcacgacgccactgatcctggctgcccgcctggccgtggagggcatgctggaggacctcatcaactcacacgccgacgtcaacgccgtagatgacctgggtgagcccacgggggcacggctgctctgtcgtggggcgggaccgccacagggacgggtgggactgggttgcctccagctggtctccaacctaccccatctgcttctttcacgcaggcaagtccgccctgcactgggccgccgccgtgaacaatgtggatgccgcagttgtgctcctgaagaacggggctaacaaagatatgcagaacaacagggtgagcgcgaggctgggatgccaggggagacgtgagggctgaatccacagagaagtgagggccaaacccacggggcgcagggacacaagggcctgacccacagggtctcgagggtcgctgggcccgcatgtgggccccacccgcatgatgcgggcacctcgttagtgctcctgccctccttcagcccctgtttatggagcccttccaagtgcaggtccagctgtcaggacacggcggctcgcccctcagacccagccctaccctcctgggcggcagtcatggcagggcacacagcctggcgtggggaacgctgctgctgccactgctgtgtcaccgtcacctggacctcaccttctgtccccagctgtcaccaggcgggggtggggatgggaatgtggtgacgcaggtggtgcagattgagccagaacacgcgtggcggcagctccctgcggggcggggcctcttggtgtgttcaccaaggccaaggacctcaaggctcagaggaagaagtctcaggactatatccaaggggagccacccccagccctcatcctggccctgcagctcctggccctgcagctgctgttggtttcccctgggtgctcagggcacaggtgcagacacccccacctccctgccgccagaacccccacccccgcccccaactcctgctgcccccttggcatgtcaggctcaggcgtctctccctcctgggtgagggcacacagcgggcctgggcaccggggcatgttggcccaggcgctccccagtccgtggcagcatggccccacagagactgggccccagagggcatcaaggcctgggaagccccttcccactcccacacagcagcctcacccagacctgtgacgtgtccaccgcacagaggagaccccaggaaggagcttggtggccaccagggtggcttgatggccgtccagatgacgagctccctccctggtgccctcgccggtgcctctgaaccgctccaggaatttccttttgtgccttattgggggcagggaagagggcctgcagttggttagattttcagtggggtctgtgacccccccatagaggtggagccccgctgatctagggtagaggactgcacagatcccctctctgggtgggtttcagaagatgtatcaaagccttaacatttaacaagagtcaggctaggtggttgcaggacgctggggtggggtcctgaggagcagcctgcctgcccccaccccgcggaggaggttgtactgctgcttcctctggtgatggaaccttggggagggtccccacgcctggcctggcccccctcaccggcccccgccctcatcccccaggaggagacacccctgtttctggccgcccgggagggcagctacgagaccgccaaggtgctgctggaccactttgccaaccgggacatcacggatcatatggaccgcctgccgcgcgacatcgcacaggagcgcatgcatcacgacatcgtgaggctgctggacgagtacaacctggtgcgcagcccgcagctgcacggagccccgctggggggcacgcccaccctgtcgcccccgctctgctcgcccaacggctacctgggcagcctcaagcccggcgtgcagggcaagaaggtccgcaagcccagcagcaaaggcctggcctgtggaagcaaggaggccaaggacctcaaggcacggaggaagaagtcccaggatggcaagggctgcctgctggacagctccggcatgctctcgcccgtggactccctggagtcaccccatggctacctgtcagacgtggcctcgccgccactgctgccctccccgttccagcagtctccgtccgtgcccctcaaccacctgcctgggatgcccgacacccacctgggcatcgggcacctgaacgtggcggccaagcccgagatggcggcgctgggtgggggcggccggctggcctttgagactggcccacctcgtctctcccacctgcctgtggcctctggcaccagcaccgtcctgggctccagcagcggaggggccctgaatttcactgtgggcgggtccaccagtttgaatggtcaatgcgagtggctgtcccggctgcagagcggcatggtgccgaaccaatacaaccctctgcgggggagtgtggcaccaggccccctgagcacacaggccccctccctgcagcatggcatggtaggcccgctgcacagtagccttgctgccagcgccctgtcccagatgatgagctaccagggcctgcccagcacccggctggccacccagcctcacctggtgcagacccagcaggtgcagccacaaaacttacagatgcagcagcagaacctgcagccagcaaacatccagcagcagcaaagcctgcagccgccaccaccaccaccacagccgcaccttggcgtgagctcagcagccagcggccacctgggccggagcttcctgagtggagagccgagccaggcagacgtgcagccactgggccccagcagcctggcggtgcacactattctgccccaggagagccccgccctgcccacgtcgctgccatcctcgctggtcccacccgtgaccgcagcccagttcctgacgcccccctcgcagcacagctactcctcgcctgtggacaacacccccagccaccagctacaggtgcctgagcaccccttcctcaccccgtcccctgagtcccctgaccagtggtccagctcgtccccgcattccaacgtctccgactggtccgagggcgtctccagccctcccaccagcatgcagtcccagatcgcccgcattccggaggccttcaagtaaacggcgcgccccacgagaccccggcttcctttcccaagccttcgggcgtctgtgtgcgctctgtggatgccagggccgaccagaggagcctttttaaaacacatgtttttatacaaaataagaacaaggattttaattttttttagtatttatttatgtacttttattttacacagaaacactgcctttttatttatatgtactgttttatctggccccaggtagaaacttttatctattctgagaaaacaagcaagttctgagagccagggttttcctacgtaggatgaaaagattcttctgtgtttataaaatataaacaaagattcatgatttataaatgccatttatttattgattccttttttcaaaatccaaaaagaaatgatgttggagaagggaagttgaacgagcatagtccaaaaagctcctggggcgtccaggccgcgccctttccccgacgcccacccaaccccaagccagcccggccgctccaccagcatcacctgcctgttaggagaagctgcatccagaggcaaacggaggcaaagctggctcaccttccgcacgcggattaatttgcatctgaaataggaaacaagtgaaagcatatgggttagatgttgccatgtgttttagatggtttcttgcaagcatgcttgtgaaaatgtgttctcggagtgtgtatgccaagagtgcacccatggtaccaatcatgaatctttgtttcaggttcagtattatgtagttgttcgttggttatacaagttcttggtccctccagaaccaccccggccccctgcccgttcttgaaatgtaggcatcatgcatgtcaaacatgagatgtgtggactgtggcacttgcctgggtcacacacggaggcatcctacccttttctggggaaagacactgcctgggctgaccccggtggcggccccagcacctcagcctgcacagtgtcccccaggttccgaagaagatgctccagcaacacagcctgggccccagctcgcgggacccgaccccccgtgggctcccgtgttttgtaggagacttgccagagccgggcacattgagctgtgcaacgccgtgggctgcgtcctttggtcctgtccccgcagccctggcagggggcatgcggtcgggcaggggctggagggaggcgggggctgcccttgggccacccctcctagtttgggaggagcagatttttgcaataccaagtatagcctatggcagaaaaaatgtctgtaaatatgtttttaaaggtggattttgtttaaaaaatcttaatgaatgagtctgttgtgtgtcatgccagtgagggacgtcagactcggctcagctcggggagccttagccgcccatgcactggggacgctccgctgccgtgccgcctgcactcctcagggcagcctcccccggctctacgggggccgcgtggtgccatccccagggggcatgaccagatgcgtcccaagatgttgatttttactgtgttttataaaatagagtgtagtttacagaaaaagactttaaaagtgatctacatgaggaactgtagatgatgtatttttttcatcttttttgttaactgatttgcaataaaaatgatactgatggtgatctggcttccactcccctctgctctggcctttggctccctttctgggagggaggcagggctgctatgctctgagggagccaggagtcgagggccccttctgctgggagagtgacggtgaggctgcctagtcctggcccacgggggtgtggggaccacgctgcctccagggactccatggtgtctgcagcctgcctggtccaggccctttgtagggagatggacacacagcagcaagggggttgcagccctatgggaggtggggctcgtgcctggggtgacacggctcccaggacaccatgcgtgagtctggccctcctggcagctcggggctcttctcctctcagcctcggagggatgaaggtcccacccagccatcctggggacagcccctcagggagctctgcagcaggcagggggctgcatagggagggccttgaggcagtggcatgacccctctacgggctggagaccacagggaggactctggcccctataggagggcaaagggagctgtcgaagcctatgagcagggcagcatgggtcgtggcagagtctggaaagttgtgtgatcctaaggaactggctgagcgaggcagaggcggcctggtcctggggccctgcccctgaatagagctgccagcctcacacaagggtgggccccttctctccccactgcctgggcctctgcccagccccagaccttcagggcaggccagtggcttcaaaccagagcggtggggagtctgagatccctctttggattgcaaagcactgcctgccctgggcccagtctctccaaggagggatgtgagcccgaggcctctactatggctgggggctgcgtctgccagccagcgctgggcaccaggaccaggaggggccaccgtggaactgcagtgagtggcctgactcttgtcttcaaagggggtgacccagccggagtcctgcccataaaactcccagcaccctgaaattccactcctgggggtctgtccgaaagaagtgaaaacagggactcaaacaaacgcacgtggccacttgctgtcccagcatcactcagtacagccacagacagcctgagcgtccactgccaacgacgggtcagcaaaaccgtctgctgtgacggtgaaccttagtgtcagcttggccgggccatttcgccaaacggagtgtgtctctgaggtgttctggatgaggttcgcatttgcatccacagcctgggtaaggcagtccgccctccccagtgtgggtgggccccgtgcggtccgctgaggcccggggagaacaataggccgagtgccaggggtcctcccacccaaccgcttgcactggacattggtcttttcctgccttcagacttggactgaaaacgtgggctcttcctgggcctggagcccaccggccttcggactcgcaacgccatcaggcctcctgcctgcaactgcagaccctgggaactgcaggcctcgaggtcgtgtggccaattccctgcaataacctctccagtggcacgtcttatgggctccgcttgccggaagaaccctgacgaatgcgcacgagggaatatgattccaccgtagaaaaggaggcgctgacacccaccatgcggacaagccttggaagcacggtgctcagtgaagggtgccggccgcaaagggccgcaggtgcagtgactccatttctatggggtgcctgtggtcaccgaacccatggagacagaaagtagattgatggttcccagagccggggggaggaggaaaggggagtggctgctaaacggcccggggtttttttttgttttgttttgtttttatactttaagttttagtttattgtggcactgttcacaatagcaaagacttggaaccaacccaaatgtccaacaatgatagactagattaagaaaatgtggcacatatataccatggaatactatgcagccataaaaaatgatgagttcatgtcctttgtagggacgtggatgaagacggcccggggttttactttggagtgacgcaaatgttctgggcccagggagaggtggtgcgtgcacagcccttcgagtgcactaaatgccaataacgcggacacttttttttttttttttttgagacggagtctcgctctgtcacccaggctggaatgtggtggcgtgatcttggctcactgcaacctccgcctctgtgttcaagtgattctcctgcctcagcctccaaagtaactgggattacaggcccctaccaccacacccggctaatttttttgtatttttagtagagattgggtttcaccatgttggccaggctggtttcaaactcctgatctcaagtgatccacccgcctcggcctcttaaagtgctgaggttacaggcgtgagccactgcacctggcctaactcgtacactttaaagtggttaattttaggttctgtgagtctcacctcaatatgttattttttttttttaattaaaaaaagtttttgagacagggtcttgctctgtcacccaggctggagtgcagtggtgccatgatagcttattgcagcctcaacctcctgggcccaggtgatcctcccaccttggtctctctagcagctgggattacaggtgcacaccacctcacccacccaatttttttgttattttttgcagagatggggtctcactttgttgcccaggttggtctcgaactcctgagctcatgcagtcctctcctcaccttggcctcccagagtgctgggattacaggtgtgggccattgcgcctggccacatatgcaactttaaatatttcagtagccacattaaaaaggtaaaaagaaacaggcaaagtgtatattaatactacagcttagttaatccaatatatcaaaaatattattttaacacaacataaaaagtgaatgagtttttttttgttgttttttgttttttgagacagagtctccctctgtcacccaggctggagtgcagtggtgcgatctcagctcactgcaacttccgcctcccgggttcaagcgattctcctgcctcagcctcccgagtagctgggattacaggcacctgccaccacgcccagctaatttttgtatttttagtagagagggggtttcaccatgttggccaggctggtcttgatctcttgacctcgtgatcggcccacctcggcctcccaaagtgctgggattataggcgtaagccaccacgcccggccgtgaatgagatgttttatattctttttgtttgtttgtttttggtactgtgtctttgaaacccaggatgtacagtacactcacagcaccctagattgggcctggccacactttaaaaggtgttcagtatctccaggaggctcacgtccagattcggactcttcagcaggatgccaagggggctccagacagttccacccagcgcaggaaaacaccaagtgtatcttcagcctggtgactcactccacgccgctgccggcgtgaaccccgagtgtggcgctgcgtccctctggatagagcaaaggagggtcccaagagcccggaggcaccaactcatcagggcccacaaatcaggcccccggcaggcagggctgcctccatccaagagggaagcacggtgccgtagcccccgggctgctccagggatcgacaggcctgtgctgccttcatcccaaaagtctcacttgcaaagggtgtccgtggggctcaactgcgtgctcagcggtggactgatttcgttctgtgtggctccttatctcatcgtggacccaaatccacgaaccacacatgaggagctctgctggagggggcagcactgggcagaggcagacaagggggagcgtcacgcggctgtttcccgtggtgagcatccaccagcagcggttcctggtgggacaccgacgtattcgtctgcaaaagtaaaagtgtttcaaaacaaaaccgggtccagcttggtcccggtgcgttgaaagtgctggcgttggccaggcgtggtggctcacgcctgtaatcccagcactttgggaggctgaggcgggtggatcacaaggtcaggagattgagaccatcctggctaacacggtgaaaccccgtctctactaaaaaatacaaaaaattagccgggcgtggtggcaggcgcctgtagtcctagctacttgggaggctgaggcaggagaatggcgtgaacctgggaggcggagcttgcagtgagcagagatcatgcctctgcactccagcctgggcgacagagcaagacactctcacaaaaaaaaaaaaaaaaaaaaagtgctggcgttagtggaggtctctcagagggggcgttgcagggcctcccacgttactcaggctttgcagacgaagacgcagggtcagtgagtgagcgagctttgggaaaggctgttcttcaatctgcatcttgaaggtggctgggtggcgcctcagtcgcctgccccgacgtgactcccgatctggctgctttgtgtctttgctttccacctggcggctgctgtcctggctgttgctgtacctcagtgtcctcgtgggtcaagtggggacctgggtgctggccctgggcctgcgatggtgagctgctggtgcacgctgggcatggggtgagggctcagaaagggaacagctcttgttatcgttaggaggttttcaatcgcattctttgttctccacctgcatgccgtgttggcacagttaagcctggcggccccttcagcaggtgtcctaaccgtctacattttaagatggacaagtctaggctcatggagattgcaggactgagctgcgaagctttattcatgcccaacacgacaggtgccaggtgcccagggcctcagaggtgggtttccgttgttcttcacacaaccttgaacttgtggcccatccctggaccttacagcacaggacacactctcagtgtttgttaggaatctataattttctgcggagtcacgcgtgatatttgctgtggcttttggtatatcttccactctatcgcacgggattttctggtgaaaatgtgccctgggtccacacaaacgtgcacattctaccacagcctttgtcgttctgtttggcatttttccatttaataaaatgaaccttagaaaagttataactacggccaggcgtggtggctcacacctgtcatcccagcacttcgggaggccgaggcgagaggatcacctgtggtcaggagttccacaccagcctggtcaactggtgaaacccccctctccactaaaaatacaaaaattagctgggcaccatggtgggcacctagaatctcagctacttgggggggctgaggcaggagaattgcttgaattcggaaggaggaggttgcagtgagctgagattgcaccactgcactccagcctgggggatacagtgagactcggtctcaaaaaaaaaaaagaaaagtgtataactttacttttttttctttttgtggagatggaatcttgctatgttgcccaggctggtctcaaacccctaggttcaagtgatcctcccactttggcctcccaaaatgctgagacgacagatgggagcaacctcacctggcaagcgtgcacctgttactttggccgactcagaggcggctctctgcctccccctggtggcactgctctgccagcgccccacaggtcctcccgagtgaccacagggcagaaatggccctcaccccacgcccagggccatcccccgcgacactgctattatcctgttttacacatgaggaagctggggctcaaagaggttaggcgacttagccaagttcgcccattcactgagccagggctatgtgattcccggtccgtgtcaaaccacgaggagtcacctgccctcagaggagcaggaaggcctgtagagttgatgccatccagcctggtgacttttcagacagggagacggctgctcagaggggagaagggggttgttgggccactttgccaggagtcaataccatggccagcctggcatcggatactttgccaggagttaatgccacgactggcctggcatcgaatactggagctcttcccagctccacccgggcccttttctcttccctatctacagtccccaggccaccaagtccatgtccaccacttaaatcatcactcaatgctcaggactgtctcctgcctgctgtgtgtgaaccccgtgctgtgctggggttgtgccctcggggactctcccgggttcttggggactctcctgggttcagcgcctctttctcctaggccacccaaggctgcctcctgggccctggctctccctagcccctagctcgaaccctaacctggagagcctttggggcccaaactggttgcatcgctcctggctgaaaagcctctggaagcttcctatacttccagacaccacctgcgggtctcttagcaagcctacagagtccacactagcctacgcccactggccgctcaccccgcagaagcctcatgtggactgttcacttcagccagaaatgctccttctcctcctgcctgtccccagcagacactgcatggtgccctctgtatgggcacctctgtggccagccagcatccatgttccccggaggcagagtctgggcttgtctgtctcacggccacagcccagctcctagcagtgcctggggtacagcagggactcagcagacatctgtgcatggtttggggatagaggactcgtgagcttaccaagaccctgcctcagctcaaggacagccagcagttcctcctgtggccctgggggcctgcggtcccaggttactgtgacatcgacatcagccttgagctttctgcttcattcctagtgctttttagcaccttacatggtaagtacttggctcaatgattccagaaaaatgttctctgagacctgctatgtgcccaacatgcttgaagatgctggagatgaggagcatgacgctcctgcagtaacgaggctgctggcaatgccgtcaatgtgccctgtgcctccggggaggcctggtgtggaggatacgcttgccaccctgtgaggtcaggtccaggaagtccttgcaggaggccgggaaagggcaaggctgtcaccttcttttacaggggaggaggcagaggcttggaaaggccaggtagcttgcccaaggctgaacacctgggtagtggctgagggtctctgacttctggaagcttgcagtacagctggacacacggtagttagcccaccattgctggagccatcttacctgtgctctgctagccaggtgggcgcccaaaaggagatgcctttgcctgtgctgggaggaggcgctgtgggacccattccccagcagccgagagcaagggcacatgtgccagggcggggatgcaccttcagcctcatgtcagccctgggaaggcctagaaagtggacagtgctgtctcgctgcacacccctggcgagcacaccgggcgagcactccaggttagggtggggctcagaggtgagtagaacacgggaagggggtggcagcgtggtgagcatgtttgcggaccctatgctgtgtgcttggcaggccttgtgcatggaagtgagtgggactgaagctccctccacactgcccaccatggccctgggggtctggccttcccctcacagaggtgacttcctctcctctatgagggtaagaagaggaagcctggcccaccctctggccagcctggtggcatgctgacagggaacccctgcaggggcctgatgaacaaacgccacagaacaaactctacggaccctgcctccagatctgcttcctctcccctgattccagcttcccagccctattccctcctcctccaggaagagctccgtgtcagtgctctccaccttggaggccttcatatgtttttttgcctggaccacccagctaaccgtctcacagagactgccccttcctctctccaggccaagcctccagcttcagcgtccaggactaagggtctgtgtcaggggctgaggacagtgtccggcagggagcaggcctgcccagtaaacctccacaagcacccagacatactcgccactgctattttacaccaggtaggaaagaggagcagaagctcacagtgaggggccgtcctgcgttcactgagactgctgctctgctgggggctccctggaggaccgccactggcccgccagttgtcagcaaagagccaggtccacccatcagcctctggcatttcaggcccctatcataggaggctataagcacaggctaggggtgctgagtgcctgccttctagaccaacactgtccagtggaaatgtaacaccagccccatgtggagttttacatttcccagcagctatgtcaaaaacaaaagaaacaggtgaaataaaattaaatagtattttgtttaatctgatacatccaagatattgtcattttaatatgcaataaaaaatgattgattcgatatttgcatccttcacaacctaccatgtagtttacactcagagcccagctcagtctcacagcaagcaccagcggcccccgtgctggacagcatggctaatgggaggagctgacccgtcggaggcaccaaggtcacgctgtgaccaaggctgtggtgacgcaaaggcagcgggtttcctggcacagcctggaggtgcaccagcctgtcctgtgtgctctgcataatgtggtacagcagtggtcacagagctttgcaccagatgctgattccagcccacctaggggggttcagggaagtggtgacacttgtgtccagcctccaggtgtgagcaggggcagagacttggagaatggagaaaccagcggatgctgcaggcaaaagcagcaaagccccaccaggaatagtgatggccaccaccggcgggacacctcccagcactgggtggaggcctctgctggctcgcagtcagtcacctgatgtccccattcgcccctgccatgcttgttgtcctggcaaccccatttcagccctgaaacgtttaggtgctcatcttgctctatcttagagatgaagacctgatgctcagagactaaggaagttgaaaaagggcacacagcgtctcaggggcaggctgggccttcaacggaagggtctatggcccagaggctggatgggctcgggtgtagggtgcaggaaccctccactccacatcaggctacaaactgctgagagctgtctccgtgcactcaggattagggagaagagggggaagaaagacagccgcgccccctgcaggtgatgtggtgattcacacccctaggagccaacagaagccgctgtctaacatccctgccctgaggtccagagaccttgcattttatgcctagggcagggttggtttctgcagctatggtctctcccatagcttagtgcccaccccggtgggaccacagggtttcggaggaccctagagggtcgagccctgggctcctggctcttgggttctttgaactcgcgagcggcaaaaggcgagccccacgcctgagaggcagcatccacctctgcatccccctctttggaaagggcaaacaatgacacctccttccgcggagggtgcagagcgcctcgaccactgggaagaagcagatgggggcagcggggctggggctgggccctaccacgtgctccctaactctgttcaaacaggtcaggaatctgactcctgaaaggcaaatgttagctgagcagattggccctggtgccacgtcagccggactgaagctctccctgcaccgcctgcggccctgctggcgtggcacggatatcaccccctccctcaccagccgccggcccagctggggacaagggtggctcccacccagggaggacctcagccgctgctgggagctcagcctcccgcgatgccatcgggcgggcacccccaccacggcgcctgccctctggaaggagcagcagaggaaggccgcggctcttccctgcccttgccaggcaggtgtgcaggtgagtgggcccggcatggctggccgcttcctca

SEQ ID NO: 17 - DNA, 2248 bp, Homo sapiens
cagccagtgcaactcagccggctgcctcttcgacggctttgactgccagcgtgcggaaggccagtgcaaccccctgtacgaccagtactgcaaggaccacttcagcgacgggcactgcgaccagggctgcaacagcgcggagtgcgagtgggacgggctggactgtgcggagcatgtacccgagaggctggcggccggcacgctggtggtggtggtgctgatgccgccggagcagctgcgcaacagctccttccacttcctgcgggagctcagccgcgtgctgcacaccaacgtggtcttcaagcgtgacgcacacggccagcagatgatcttcccctactacggccgcgaggaggagctgcgcaagcaccccatcaagcgtgccgccgagggctgggccgcacctgacgccctgctgggccaggtgaaggcctcgctgctccctggtggcagcgagggtgggcggcggcggagggagctggaccccatggacgtccgcggctccatcgtctacctggagattgacaaccggcagtgtgtgcaggcctcctcgcagtgcttccagagtgccaccgatgtggccgcattcctgggagcgctcgcctcgctgggcagcctcaacatcccctacaagatcgaggccgtgcagagtgagaccgtggagccgcccccgccggcgcagctgcacttcatgtacgtggcggcggccgcctttgtgcttctgttcttcgtgggctgcggggtgctgctgtcccgcaagcgccggcggcagcatggccagctctggttccctgagggcttcaaagtgtctgaggccagcaagaagaagcggcgggagcccctcggcgaggactccgtgggcctcaagcccctgaagaacgcttcagacggtgccctcatggacgacaaccagaatgagtggggggacgaggacctggagaccaagaagttccggttcgaggagcccgtggttctgcctgacctggacgaccagacagaccaccggcagtggactcagcagcacctggatgccgctgacctgcgcatgtctgccatggcccccacaccgccccagggtgaggttgacgccgactgcatggacgtcaatgtccgcgggcctgatggcttcaccccgctcatgatcgcctcctgcagcgggggcggcctggagacgggcaacagcgaggaagaggaggacgcgccggccgtcatctccgacttcatctaccagggcgccagcctgcacaaccagacagaccgcacgggcgagaccgccttgcacctggccgcccgctactcacgctctgatgccgccaagcgcctgctggaggccagcgcagatgccaacatccaggacaacatgggccgcaccccgctgcatgcggctgtgtctgccgacgcacaaggtgtcttccagatcctgatccggaaccgagccacagacctggatgcccgcatgcatgatggcacgacgccactgatcctggctgcccgcctggccgtggagggcatgctggaggacctcatcaactcacacgccgacgtcaacgccgtagatgacctgggcaagtccgccctgcactgggccgccgccgtgaacaatgtggatgccgcagttgtgctcctgaagaacggggctaacaaagatatgcagaacaacagggaggagacacccctgtttctggccgcccgggagggcagctacgagaccgccaaggtgctgctggaccactttgccaaccgggacatcacggatcatatggaccgcctgccgcgcgacatcgcacaggagcgcatgcatcacgacatcgtgaggctgctggacgagtacaacctggtgcgcagcccgcagctgcacggagccccgctggggggcacgcccaccctgtcgcccccgctctgctcgcccaacggctacctgggcagcctcaagcccggcgtgcagggcaagaaggtccgcaagcccagcagcaaaggcctggcctgtggaagcaaggaggccaaggacctcaaggcacggaggaagaagtcccaggatggcaagggctgcctgctggacagctccggcatgctctcgcccgtggactccctggagtcaccccatggctacctgtcagacgtggcctcgccgccactgctgccctccccgttccagcagtctccgtccgtgcccctcaaccacctgcctgggatgcccgacacccacctgggcatcgggcacctgaacgtggcggccaagcccgagatg

SEQ ID NO: 18 - protein, 672 aa, Homo sapiens
MPPEQLRNSSFHFLRELSRVLHTNVVFKRDAHGQQMIFPYYGREEELRKHPIKRAAEGWAAPDALLGQVKASLLPGGSEGGRRRRELDPMDVRGSIVYLEIDNRQCVQASSQCFQSATDVAAFLGASLGSLNIPYKIEAVQSETVEPPPPAQLHFMYVAAAAFVLLFFVGCGVLLSRKRRRQHGQLWFPEGFKVSEASKKKRREPLGEDSVGLKPLKNASDGALMDDNQNEWGDEDLETKKFRFEEPVVLPDLDDQTDHRQWTQQHLDAADLRMSAMAPTPPQGEVDADCMDVNVRGPDGFTPLMIASCSGGGLETGNSEEEEDAPAVISDFIYQGASLHNQTDRTGETALHLAARYSRSDAAKRLLEASADANIQDNMGRTPLHAAVSADAQGVFQILIRNRATDLDARMHDGTTPLILAARLAVEGMLEDLINSHADVNAVDDLGKSALHWAAAVNNVDAAVVLLKNGANKDMQNNREETPLFLAAREGSYETAKVLLDHFANRDITDHMDRLPRDIAQERMHHDIVRLLDEYNLVRSPQLHGAPLGGTPTLSPPLCSPNGYLGSLKPGVQGKKVRKPSSKGLACGSKEAKDLKARRKKSQDGKGCLLDSSGMLSPVDSLESPHGYLSDVDPLLPSPFQQSPSVPLNHLPGMPDTHLGIGHLNVAAKPEM

SEQ ID NO: 19 - DNA, 2287 bp, Homo sapiens
cacacaggccccctccctgcagcatggcatggtaggcccgctgcacagtagccttgctgccagcgccctgtcccagatgatgagctaccagggcctgcccagcacccggctggccacccagcctcacctggtgcagacccagcaggtgcagccacaaaacttacagatgcagcagcagaacctgcagccagcaaacatccagcagcagcaaagcctgcagccgccaccaccaccaccacagccgcaccttggcgtgagctcagcagccagcggccacctgggccggagcttcctgagtggagagccgagccaggcagacgtgcagccactgggccccagcagcctggcggtgcacactattctgccccaggagagccccgccctgcccacgtcgctgccatcctcgctggtcccacccgtgaccgcagcccagttcctgacgcccccctcgcagcacagctactcctcgcctgtggacaacacccccagccaccagctacaggtgcctgagcaccccttcctcaccccgtcccctgagtcccctgaccagtggtccagctcgtccccgcattccaacgtctccgactggtccgagggcgtctccagccctcccaccagcatgcagtcccagatcgcccgcattccggaggccttcaagtaaacggcgcgccccacgagaccccggcttcctttcccaagccttcgggcgtctgtgtgcgctctgtggatgccagggccgaccagaggagcctttttaaaacacatgtttttatacaaaataagaacaaggattttaattttttttagtatttatttatgtacttttattttacacagaaacactgcctttttatttatatgtactgttttatctggccccaggtagaaacttttatctattctgagaaaacaagcaagttctgagagccagggttttcctacgtaggatgaaaagattcttctgtgtttataaaatataaacaaagattcatgatttataaatgccatttatttattgattccttttttcaaaatccaaaaagaaatgatgttggagaagggaagttgaacgagcatagtccaaaaagctcctggggcgtccaggccgcgccctttccccgacgcccacccaaccccaagccagcccggccgctccaccagcatcacctgcctgttaggagaagctgcatccagaggcaaacggaggcaaagctggctcaccttccgcacgcggattaatttgcatctgaaataggaaacaagtgaaagcatatgggttagatgttgccatgtgttttagatggtttcttgcaagcatgcttgtgaaaatgtgttctcggagtgtgtatgccaagagtgcacccatggtaccaatcatgaatctttgtttcaggttcagtattatgtagttgttcgttggttatacaagttcttggtccctccagaaccaccccggccccctgcccgttcttgaaatgtaggcatcatgcatgtcaaacatgagatgtgtggactgtggcacttgcctgggtcacacacggaggcatcctacccttttctggggaaagacactgcctgggctgaccccggtggcggccccagcacctcagcctgcacagtgtcccccaggttccgaagaagatgctccagcaacacagcctgggccccagctcgcgggacccgaccccccgtgggctcccgtgttttgtaggagacttgccagagccgggcacattgagctgtgcaacgccgtgggctgcgtcctttggtcctgtccccgcagccctggcagggggcatgcggtcgggcaggggctggagggaggcgggggctgcccttgggccacccctcctagtttgggaggagcagatttttgcaataccaagtatagcctatggcagaaaaaatgtctgtaaatatgtttttaaaggtggattttgtttaaaaaatcttaatgaatgagtctgttgtgtgtcatgccagtgagggacgtcagactcggctcagctcggggagccttagccgcccatgcactggggacgctccgctgccgtgccgcctgcactcctcagggcagcctcccccggctctacgggggccgcgtggtgccatccccagggggcatgaccagatgcgtcccaagatgttgatttttactgtgttttataaaatagagtgtagtttacagaaaaagactttaaaagtgatctacatgaggaactgtagatgatgtatttttttcatcttttttgttaactgatttgcaataaaaatgatactgatggtg

SEQ ID NO: 20 - protein, 141 aa, Homo sapiens
MSNMRCVDCGTCLGHTRRHPTLFWGKTLPGLTPVAAPAPQPAQCPPGSEEDAPATQPGPQLAGPDPPWAPVFCRRLARAGHIELCNAVGCVLWSCPRSPGRGHAVGQGLEGGGGCPWATPPSLGGADFCNTKYSLWQKKCL

SEQ ID NO: 21 - DNA, 8308 bp, Homo sapiens
cgcaggaggccgccgcccgggcgcagagggcagccggtggggaggcatgccgccgctcctggcgcccctgctctgcctggcgctgctgcccgcgctcgccgcacgaggcccgcgatgctcccagcccggtgagacctgcctgaatggcgggaagtgtgaagcggccaatggcacggaggcctgcgtctgtggcggggccttcgtgggcccgcgatgccaggaccccaacccgtgcctcagcaccccctgcaagaacgccgggacatgccacgtggtggaccgcagaggcgtggcagactatgcctgcagctgtgccctgggcttctctgggcccctctgcctgacacccctggacaacgcctgcctcaccaacccctgccgcaacgggggcacctgcgacctgctcacgctgacggagtacaagtgccgctgcccgcccggctggtcagggaaatcgtgccagcaggctgacccgtgcgcctccaacccctgcgccaacggtggccagtgcctgcccttcgaggcctcctacatctgccactgcccacccagcttccatggccccacctgccggcaggatgtcaacgagtgtggccagaagcccgggctttgccgccacggaggcacctgccacaacgaggtcggctcctaccgctgcgtctgccgcgccacccacactggccccaactgcgagcggccctacgtgccctgcagcccctcgccctgccagaacgggggcacctgccgccccacgggcgacgtcacccacgagtgtgcctgcctgccaggtcagtactgtaccgaggatgtggacgagtgccagctgatgccaaatgcctgccagaacggcgggacctgccacaacacccacggtggctacaactgcgtgtgtgtcaacggctggactggtgaggactgcagcgagaacattgatgactgtgccagcgccgcctgcttccacggcgccacctgccatgaccgtgtggcctccttctactgcgagtgtccccatggccgcacaggtctgctgtgccacctcaacgacgcatgcatcagcaacccctgtaacgagggctccaactgcgacaccaaccctgtcaatggcaaggccatctgcacctgcccctcggggtacacgggcccggcctgcagccaggacgtggatgagtgctcgctgggtgccaacccctgcgagcatgcgggcaagtgcatcaacacgctgggctccttcgagtgccagtgtctgcagggctacacgggcccccgatgcgagatcgacgtcaacgagtgcgtctcgaacccgtgccagaacgacgccacctgcctggaccagattggggagttccagtgcatctgcatgcccggctacgagggtgtgcactgcgaggtcaacacagacgagtgtgccagcagcccctgcctgcacaatggccgctgcctggacaagatcaatgagttccagtgcgagtgccccacgggcttcactgggcatctgtgccagtacgatgtggacgagtgtgccagcaccccctgcaagaatggtgccaagtgcctggacggacccaacacttacacctgtgtgtgcacggaagggtacacggggacgcactgcgaggtggacatcgatgagtgcgaccccgacccctgccactacggctcctgcaaggacggcgtcgccaccttcacctgcctctgccgcccaggctacacgggccaccactgcgagaccaacatcaacgagtgctccagccagccctgccgccacgggggcacctgccaggaccgcgacaacgcctacctctgcttctgcctgaaggggaccacaggacccaactgcgagatcaacctggatgactgtgccagcagcccctgcgactcgggcacctgtctggacaagatcgatggctacgagtgtgcctgtgagccgggctacacagggagcatgtgtaacatcaacatcgatgagtgtgcgggcaacccctgccacaacgggggcacctgcgaggacggcatcaatggcttcacctgccgctgccccgagggctaccacgaccccacctgcctgtctgaggtcaatgagtgcaacagcaacccctgcgtccacggggcctgccgggacagcctcaacgggtacaagtgcgactgtgaccctgggtggagtgggaccaactgtgacatcaacaacaacgagtgtgaatccaacccttgtgtcaacggcggcacctgcaaagacatgaccagtggctacgtgtgcacctgccgggagggcttcagcggtcccaactgccagaccaacatcaacgagtgtgcgtccaacccatgtctgaaccagggcacgtgtattgacgacgttgccgggtacaagtgcaactgcctgctgccctacacaggtgccacgtgtgaggtggtgctggccccgtgtgcccccagcccctgcagaaacggcggggagtgcaggcaatccgaggactatgagagcttctcctgtgtctgccccacgggctggcaagggcagacctgtgaggtcgacatcaacgagtgcgttctgagcccgtgccggcacggcgcatcctgccagaacacccacggcggctaccgctgccactgccaggccggctacagtgggcgcaactgcgagaccgacatcgacgactgccggcccaacccgtgtcacaacgggggctcctgcacagacggcatcaacacggccttctgcgactgcctgcccggcttccggggcactttctgtgaggaggacatcaacgagtgtgccagtgacccctgccgcaacggggccaactgcacggactgcgtggacagctacacgtgcacctgccccgcaggcttcagcgggatccactgtgagaacaacacgcctgactgcacagagagctcctgcttcaacggtggcacctgcgtggacggcatcaactcgttcacctgcctgtgtccacccggcttcacgggcagctactgccagcacgatgtcaatgagtgcgactcacagccctgcctgcatggcggcacctgtcaggacggctgcggctcctacaggtgcacctgcccccagggctacactggccccaactgccagaaccttgtgcactggtgtgactcctcgccctgcaagaacggcggcaaatgctggcagacccacacccagtaccgctgcgagtgccccagcggctggaccggcctttactgcgacgtgcccagcgtgtcctgtgaggtggctgcgcagcgacaaggtgttgacgttgcccgcctgtgccagcatggagggctctgtgtggacgcgggcaacacgcaccactgccgctgccaggcgggctacacaggcagctactgtgaggacctggtggacgagtgctcacccagcccctgccagaacggggccacctgcacggactacctgggcggctactcctgcaagtgcgtggccggctaccacggggtgaactgctctgaggagatcgacgagtgcctctcccacccctgccagaacgggggcacctgcctcgacctccccaacacctacaagtgctcctgcccacggggcactcagggtgtgcactgtgagatcaacgtggacgactgcaatccccccgttgaccccgtgtcccggagccccaagtgctttaacaacggcacctgcgtggaccaggtgggcggctacagctgcacctgcccgccgggcttcgtgggtgagcgctgtgagggggatgtcaacgagtgcctgtccaatccctgcgacgcccgtggcacccagaactgcgtgcagcgcgtcaatgacttccactgcgagtgccgtgctggtcacaccgggcgccgctgcgagtccgtcatcaatggctgcaaaggcaagccctgcaagaatgggggcacctgcgccgtggcctccaacaccgcccgcgggttcatctgcaagtgccctgcgggcttcgagggcgccacgtgtgagaatgacgctcgtacctgcggcagcctgcgctgcctcaacggcggcacatgcatctccggcccgcgcagccccacctgcctgtgcctgggccccttcacgggccccgaatgccagttcccggccagcagcccctgcctgggcggcaacccctgctacaaccaggggacctgtgagcccacatccgagagccccttctaccgttgcctgtgccccgccaaattcaacgggctcttgtgccacatcctggactacagcttcgggggtggggccgggcgcgacatccccccgccgctgatcgaggaggcgtgcgagctgcccgagtgccaggaggacgcgggcaacaaggtctgcagcctgcagtgcaacaaccacgcgtgcggctgggacggcggtgactgctccctcaacttcaatgacccctggaagaactgcacgcagtctctgcagtgctggaagtacttcagtgacggccactgtgacagccagtgcaactcagccggctgcctcttcgacggctttgactgccagcgtgcggaaggccagtgcaaccccctgtacgaccagtactgcaaggaccacttcagcgacgggcactgcgaccagggctgcaacagcgcggagtgcgagtgggacgggctggactgtgcggagcatgtacccgagaggctggcggccggcacgctggtggtggtggtgctgatgccgccggagcagctgcgcaacagctccttccacttcctgcgggagctcagccgcgtgctgcacaccaacgtggtcttcaagcgtgacgcacacggccagcagatgatcttcccctactacggccgcgaggaggagctgcgcaagcaccccatcaagcgtgccgccgagggctgggccgcacctgacgccctgctgggccaggtgaaggcctcgctgctccctggtggcagcgagggtgggcggcggcggagggagctggaccccatggacgtccgcggctccatcgtctacctggagattgacaaccggcagtgtgtgcaggcctcctcgcagtgcttccagagtgccaccgatgtggccgcattcctgggagcgctcgcctcgctgggcagcctcaacatcccctacaagatcgaggccgtgcagagtgagaccgtggagccgcccccgccggcgcagctgcacttcatgtacgtggcggcggccgcctttgtgcttctgttcttcgtgggctgcggggtgctgctgtcccgcaagcgccggcggcagcatggccagctctggttccctgagggcttcaaagtgtctgaggccagcaagaagaagcggcgggagcccctcggcgaggactccgtgggcctcaagcccctgaagaacgcttcagacggtgccctcatggacgacaaccagaatgagtggggggacgaggacctggagaccaagaagttccggttcgaggagcccgtggttctgcctgacctggacgaccagacagaccaccggcagtggactcagcagcacctggatgccgctgacctgcgcatgtctgccatggcccccacaccgccccagggtgaggttgacgccgactgcatggacgtcaatgtccgcgggcctgatggcttcaccccgctcatgatcgcctcctgcagcgggggcggcctggagacgggcaacagcgaggaagaggaggacgcgccggccgtcatctccgacttcatctaccagggcgccagcctgcacaaccagacagaccgcacgggcgagaccgccttgcacctggccgcccgctactcacgctctgatgccgccaagcgcctgctggaggccagcgcagatgccaacatccaggacaacatgggccgcaccccgctgcatgcggctgtgtctgccgacgcacaaggtgtcttccagatcctgatccggaaccgagccacagacctggatgcccgcatgcatgatggcacgacgccactgatcctggctgcccgcctggccgtggagggcatgctggaggacctcatcaactcacacgccgacgtcaacgccgtagatgacctgggcaagtccgccctgcactgggccgccgccgtgaacaatgtggatgccgcagttgtgctcctgaagaacggggctaacaaagatatgcagaacaacagggaggagacacccctgtttctggccgcccgggagggcagctacgagaccgccaaggtgctgctggaccactttgccaaccgggacatcacggatcatatggaccgcctgccgcgcgacatcgcacaggagcgcatgcatcacgacatcgtgaggctgctggacgagtacaacctggtgcgcagcccgcagctgcacggagccccgctggggggcacgcccaccctgtcgcccccgctctgctcgcccaacggctacctgggcagcctcaagcccggcgtgcagggcaagaaggtccgcaagcccagcagcaaaggcctggcctgtggaagcaaggaggccaaggacctcaaggcacggaggaagaagtcccaggatggcaagggctgcctgctggacagctccggcatgctctcgcccgtggactccctggagtcaccccatggctacctgtcagacgtggcctcgccgccactgctgccctccccgttccagcagtctccgtccgtgcccctcaaccacctgcctgggatgcccgacacccacctgggcatcgggcacctgaacgtggcggccaagcccgagatggcggcgctgggtgggggcggccggctggcctttgagactggcccacctcgtctctcccacctgcctgtggcctctggcaccagcaccgtcctgggctccagcagcggaggggccctgaatttcactgtgggcgggtccaccagtttgaatggtcaatgcgagtggctgtcccggctgcagagcggcatggtgccgaaccaatacaaccctctgcgggggagtgtggcaccaggccccctgagcacacaggccccctccctgcagcatggcatggtaggcccgctgcacagtagccttgctgccagcgccctgtcccagatgatgagctaccagggcctgcccagcacccggctggccacccagcctcacctggtgcagacccagcaggtgcagccacaaaacttacagatgcagcagcagaacctgcagccagcaaacatccagcagcagcaaagcctgcagccgccaccaccaccaccacagccgcaccttggcgtgagctcagcagccagcggccacctgggccggagcttcctgagtggagagccgagccaggcagacgtgcagccactgggccccagcagcctggcggtgcacactattctgccccaggagagccccgccctgcccacgtcgctgccatcctcgctggtcccacccgtgaccgcagcccagttcctgacgcccccctcgcagcacagctactcctcgcctgtggacaacacccccagccaccagctacaggtgcctgagcaccccttcctcaccccgtcccctgagtcccctgaccagtggtccagctcgtccccgcattccaacgtctccgactggtccgagggcgtctccagccctcccaccagcatgcagtcccagatcgcccgcattccggaggccttcaagtaaacggcgcgccccacgagaccccggcttcctttcccaagccttcgggcgtctgtgtgcgctctgtggatgccagggccgaccagaggagcctttttaaaacacatgtttttatacaaaataagaacaaggattttaattttttttagtatttatttatgtacttttattttacacagaaacactgcctttttatttatatgtactgttttatctggccccaggtagaaacttttatctattctgagaaaacaagcaagttctgagagccagggttttcctacgtaggatgaaaagattcttctgtgtttataaaatataaacaaagattcatgatttataaatgccatttatttattgattccttttttcaaaatccaaaaagaaatgatgttggagaagggaagttgaacgagcatagtccaaaaagctcctggggcgtccaggccgcgccctttccccgacgcccacccaaccccaagccagcccggccgctccaccagcatcacctgcctgttaggagaagctgcatccagaggcaaacggaggcaaagctggctcaccttccgcacgcggattaatttgcatctgaaataggaaacaagtgaaagcatatgggttagatgttgccatgtgttttagatggtttgcacccatggtaccaatcatgaatctttgtttcaggttcagtattatgtagttgttcgttggttatacaag

SEQ ID NO: 22 - protein, 2494 aa, Homo sapiens
MPPLLAPLLCLALLPARPRCSQPGETCLNGGKCEAANGTEACVCGGAFVGPRCQDPNPCLSTPCKNAGTCHVVDRRGVADYACSCALGFSGPLCLTPLDNACLTNPCRNGGTCDLLTLTEYKCRCPPGWSGKSCQQADPCNPCANGGQCLPFEASYICHCPPSFHGPTCRQDVNECGQKPGLCRHGGTCHNEVGSYRCVCRATHTGPNCERPYVPCSPSPCQNGGTCRPTGDVTHECACLPGQYCTEDVDECQLMPNACQNGGTCHNTHGGYNCVCVNGWTGEDCSENIDDCASAACFHGATCHDRVASFYCECPHGRTGLLCHLNDACISNPCNEGSNCDTNPVNGKAICTCPSGYTGPACSQDVDECSLGANPCEHAGKCINTLGSFECQCLQGYTGPRCEIDVNECVSNPCQNDATCLDQIGEFQCICMPGYEGVHCEVNTDECASSPCLHNGRCLDKINEFQCECPTGFTGHLCQYDVDECASTPCKNGAKCLDGPNTYTCVCTEGYTGTHCEVDIDECDPDPCHYGSCKDGVATFTCLCRPGYTGHHCETNINECSSQPCRHGGTCQDRDNAYLCFCLKGTTGPNCEINLDDCASSPCDSGTCLDKIDGYECACEPGYTGSMCNINIDECAGNPCHNGGTCEDGINGFTCRCPEGYHDPTCLSEVNECNSNPCVHGACRDSLNGYKCDCDPGWSGTNCDINNNECESNPCVNGGTCKDMTSGYVCTCREGFSGPNCQTNINECNPCLNQGTCIDDVAGYKCNCLLPYTGATCEVVLAPCAPSPCRNGGECRQSEDYESFSCVCPTGWQGQTCEVDINECVLSPCRHGASCQNTHGGYRCHCQAGYSGRNCETDIDDCRPNPCHNGGSCTDGINTAFCDCLPGFRGTFCEEDINECASDPCRNGANCTDCVDSYTCTCPAGFSGIHCENNTPDCTESSCFNGGTCVDGINSFTCLCPPGFTGSYCQHDVNECDSQPCLHGGTCQDGCGSYRCTCPQGYTGPNCQNLVHWCDSSPCKNGGKCWQTHTQYRCECPSGWTGCDVPSVSCEVAAQRQGVDVARLCQHGGLCVDAGNTHHCRCQAGYTGSYCEDLVDECSPSPCQNGATCTDYLGGYSCKCVAGYHGVNCSEEIDECLSHPCQNGGTCLDLPNTYKCSCPRGTQGVHCEINVDDCNPPVDPVSRSPKCFNNGTCVDQVGGYSCTCPPGFVGERCEGDVNECLSNPCDRTQNCVQRVNDFHCECRAGHTGRRCESVINGCKGKPCKNGGTCAVNTRFICKCPAGFEGATCENDARTCGSLRCLNGGTCISGPRSPTCLCLGPFTGPECQFPASSPCLGGNPCYNQGTCEPTSESPFYRCLCPAKFNGLLCHILDYSFGGGAGRDIPPPLIEEACELPECQEDAGNKVCSLQCNNHACGWDGGDCSLNFNDPWKNCTQSLQCWKYFSDGHCDSQCNSAGCLFDGFDCQRAEGQCNPLYDQYCKDHFSDGHCDQGCNSAECEWDGLDCAEHVPERLAAGTLVVVVLMPPEQLRNSSFHFLRELSRVLHTNVVFKRDAHGQQMIFPYYGREEELRKHPIKRAAEGWAAPDALLGQVKASLLPGGSEGGRRRRELDPMDVRGSIVYLEIDNRQCVQASSQCFQSATDVAAFLGASLGSLNIPYKIEAVQSETVEPPPPAQLHFMYVAAAAFVLLFFVGCGVLLSRKRRRQHGQLWFPEGFKVSEASKKKRREPLGEDSVGLKPLKNASDGALMDDNQNEWGDEDLETKKFRFEEPVVLPDLDDQTDHRQWTQQHLDAADLRMSAMAPTPPQGEVDADCMDVNVRGPDGFTPLMIASCSGGGLETGNSEEEEDAPAVISDFIYQGASLHNQTDRTGETALHLAARYSRSDAAKRLLEASADANIQDNMGRTPLHAAVSADAQGVFQILIRNRATDLDARMHDGTTPLILAARLAVEGMLEDLINSHADVNAVDDLGKSALHWAAAVNNVDAAVVLLKNGANKDMQNNREETPLFLAAREGSYETAKVLLDHFANRDITDHMDRLPRDIAQERMHHDIVRLLDEYNLVRSPQLHGAPLGGTPTLSPPLCSPNGYLGSLKPGVQGKKVRKPSSKGLACGSKEAKDLKARRKKSQDGKGCLLDSSGMLSPVDSLESPHGYLSDVDPLLPSPFQQSPSVPLNHLPGMPDTHLGIGHLNVAAKPEMAALGGGGRLAFETGPPRLSHLPVASGTSTVLGSSSGGALNFTVGGSTSLNGQCEWLSRLQSGMVPNQYNPLRGSVAPGPLSTQAPSLQHGMVGPLHSSLAASALSQMMSYQGLPSTRLATQPHLVQTQQVQPQNLQMQQQNLQPANIQQQQSLQPPPPPPQPHLGVSSAASGHLGRSFLSGEPSQADVQPLGPSSLAVHTILPQESPALPTSLPSSLVPPVTAAQFLTPPSQHSYSSPVDNTPSHQLQVPEHPFLTPSPESPDQWSSSSPHSNVSDWSEGVSSPPTSMQSQIARIPEAFK

SEQ ID NO: 23 - DNA, 23982 bp, Mus musculus
  misc_feature (1)...(23982): n = A,T,C or G
agaagggactagggcaagctggggcaggtagagctgtgtgtgtgtgtgtgtgtgtgtgtgtgtgtgtgtgtgtgtgtgcgcgcgcgcgccatgcttttactcccaacacttgggaggcagaggcaggtggatctccttgaattcaaggccagcctggtctactatgtagtgagttctgggacagccaggctatataaagagaccctgtctctaaaaccgatgatgatgatgatgacgacgacagcggcaacgacaataataataataacgacgaaggtgatgatgatgatgaaggggctaaggaagattatagcgcccagaggttcaacttcttagtggcctgggggctccccaagttgaactgtcccaaacctaagaactcataccgctgttctctaacctctctgaagtcttgctctttgataagaggccacaggcaggcagtgggtggcctgagctggccgagggtgccctcttgccgaccgtctggcctgagcactgacccacaggcagctagagggcggtgggacaggcggggcctggagaggcctgcgggtgcacacccattgcctaataccccaagcacgcagccagctccaagaaagaggaggggcaggaaccagagagaccttgacaagggttgagacctagatgagagggggaaaaaaggggggctgccatcactgcagggaggaaatgagagcaacctggcccatcttccttttgatgagaaaagtggaaggcccctccggcccttgcggggatggggaggggggacgtgtagcaaaacactgtgggaagaacaacgaggccctgaagggcggggagtgtcaaataaaagagtggggacctctggagatggggaaatcaagcaactgaggcggtggctaaagccgggctacactcgggaatctcctcctcctccccctcccctgatgtttgccttggctggggtcttgggtgactcatctgttgctaagccgctgataggggcggccagcccagggaacccaaattataggccctggagggatggatgcgcctgcggcggtgagctcagctgtacgcctccctccacctcaccggtcttccactgcagcaccgaaggccaccacccagaggcgccagagatgttgcagacgaactactggactccagagaagcccccacattcagtagtagccccaaggagtcttctgactcacccaagacagaatgttacccccttgtctactataggttgatggatgggttacaccctcccagcccgagggggtagcgcctgcctgggcttcaaaggcttgcccaagaactcagagctctgctccaatgttctctctctctctctctctctctctctctctctctctctctctctctctctctatcccaacgtctaagcaaagctttcaccctcccccaccgcctccctcctagatctattccaaggcctgtgttttgctacagagtttctacttcaattctttagttaactgtagccaaaagtgacagcaagccgccccctgtcccatatacctagaataaggaagttgagggagggagatcaagaattccaggagagcagatctacagatcagcatcgaagagctcttgttgcttttgtagaagacttaggttcaattccccagcgcccacaaggtggctcacaaccattcataaccttggttccttgggaatcaatatgtatgagtgtggtgcgcatatatacgagcaggcaaaacatttgaactacaaagaaaaacaaatctaataaataattttaaaaaataatttgaggccagagctaggagtggcaggcagttcatgggccttgcttttagtttgaatacaagaaaggtagagacaagtggagctgagggaattccaggctacaaggctagcctagtatacatggtaaattccaggccagcctgggctatatagtatgactgcctcaaaacaaaacaacaacaacaaaaccccaagatatctaaaggaggaacattccaaaagacagaaatgtccatagaccttgacaaaggaacatgcttggtatgttggaagggtcagaaagatcaataaaggagtaattcacaagggaagatttggttggttgtgaacctgaagacctaagaaggaacagggtcagacctggagaggcctgctagttactgtcaagattttgggtttggagtgagataaggaatcattggaaagatgtgatcagggaaattaatttttatttgtttacttttaaaattgcttgtgttcggttctgtgtttggaggccagaggtgctggagttacagacagttgtgagctacctgaagtgggagcagggaattgaatcaggtcctctgtaaggccgggtatattctcttaactcctgggccatctctcaagcccagctttgttttcagaaagggtagtttgaactgcagttggagagaaggctgtaggctagaagggagaagctggagatgtgtgctttacagactgagagtcagggtttgctgatagcctcacatgaggtgtgaaacagataagccaaggttgatacacaatttaaaattaaggtccatatatatgtgtgtgtgtgtgtgtgtgtgtgtgtgtgtgcctggtgcctggtgcctgcagaggctactcctgattcaaagatttttttttttttgccatgaagataaaggtcagagctgtcattcactgaggtgagaatgactaaaaagagagcaaactaggcaatggagagattaagaattcagtggtggccatgtgaattttgaggaatttaagtgttaggtatacaacaagagttcatatccaaagtcatagttgggaatcaagagaactggagagatggctcagtggttaagagcactgaccgctcttccagaggaccaaggttcgattccttcccagcaccacatggtgatgacaaccctctgtaactccagtcccaggggatctaatatcctcttctggactccatgggcagcaaacacacaagtggtgcatggtcacacatccatatacattaaataaatataataggaagcatgaagccatatagtttgccaagtgagtttgactaggccaaggtggccagcttaaactgggtgtactctagccttcctcttcctcccnnnnnnnnnnnnnnnnnnnnnnnnnnnnnnnnnnnnnnnnnnnnnnnnnnnnnnnnnnnnnnnnnnnnnnnnnntcctcctcctcctcctcctcctcctcctcctcctcctcttcttcttcttcttcttcttcttcttcttcttcttcttcttcttcttcttcttctttttcttcagttgttgttgttttgagccacatgtaacccaggctagcttcaaactcaatatgcagttaaatatgacattgaactctgacctctgcttctcaagtgataggactatacacgtcagtgaacatggctttatcttctctttatttttaccatacctatggtaaagcttaggacctcacatatgctaggtaagttgtgtgtgtgtgcgtgtgtgcgtgtgtgtgtgcatgtacacatacgtgtgtgagcacatgcaaaggccagaggtggggatgggtgtcttcctctatttctctttgccctatatattttttagttttcatcttattttcatttttaatttatttattattagtgtgaggggttgttgagtgtgcatcgtggtgacagccattctctcccctctgtccccacttcagcagcggtactcatagataatagggtttccctgtcttagattgcattccaccaccagagatcaagaaaggtacatgtgtgaaaggtctcagtcagggtgttactgctgtgaacagacaccattaccaaggcaaactctttttttttttttttttttttttttttttttggtttttcgagacagggtttctctgtatagccctagctgtcctggaactcactttgtagaccaggctggcctcgaactcagaaatccacctgcctctgcctccctagtgctgggattaaaggcgtgcgccaccacacccggctccaaggcaaactcttataaggacaacattttttaaaagatttatttatttattttatgtatgtgagtacactgtccctgtcttcagacgcatcagaagagggcatcagatcgcattacagatggttgtgagccaccatgtggttgctgggatttgaactcaggacccctggaagagcagtcagtgctcttaaccacgaagccatctctccagcccaaaggacaacatttaattgggcctggcttacaggttcagaggttcagtccattatcatcaaggcaggaacatgttaggcatggttcaggaggagctgagagttctacatcttgttccgaaggcaaacaggagaaggctggcttccagggagctaggatgagggtcttaaagcccacaggcacaagggcacacttcctccaacaaggccacacccactccaacaaggccacaccccctaatagcggtactccttggaccaagcatattcaaatcatcagagtgacccaggcctcagtgatgaggaatttctcagggacaaagtcaggcgacccatctatagtgctcattcccttgagccttctgtgcagggtactatgtggagaaattcctagcttacggacatgtgtaggaagctaggccattccatattatacctcagaaattcatctttggaggaagcagagttctaggctaagagagagcctgggaaagacatttccattaacaataaaataaaataaaataaaataaaataaaataaaataaaataaaatatctcagcagctagaggcatggctcatcggttaagagcatcggctgctcttccagaggacctgggttcacttcccagcaaccacatggcagctcacagctatctataactccagttccaaaggatccagcactctcacacagatatgcatgtaagcaaaacaccaatgcacataaaatgaaaataaatttatcatttttaagactccaccaagcttcatttgggttgatgtacatcttgttctaaacacattcacacctattgggatgactcagaaagttatgggacctgtgaccaaatctatcgactcgagttccatccatggaacctttgtactaaaaagagagaatcaattcttgtaagttgttctctgattatgcatgctatagcagtctcactcatttgcttattctctctctctctctctctctctctctctctctctctctctctctctctctccacacacacacagacactcaggcacacacacacaaagtgattaaatgtttaaattaagggctggagagatgattcagctgttgagagagcactgactgctcttccagggtcctaagttcaattcccagcaaccacatggtggctcacaaccatctatagtgggatccgatgccctcttctggtgtgtctacagtacacatatacataaaataaacaaataaatctttaaacattttaaattaaacacaagtgccccaggaacagtaactaaatctatcagtcatttcttcctcagagtatagcttggcgggaaaggctgatccattctgagagtcaagctcttttagagtcagactcagggagtttagtcagaaatcatacttaaaaagcagacgagatggaaacaaaaggtgccaaaaaggtggcaggccagacctaaaagtcactttctttctgtgtcaactctgaaaagggaccccagcctgctctgctgcatatcaggcagccactgagccactgacgatgcagaaagagtgtgcataggctttgagttcaaaggggctgtcaggtctgggggagggaacatgcccctaatctccactggaggactggaggaagagaggtcagaagttcaaggctagctaagaccgtatctttaatttgaagccagcctgagctacataagaccttatagcaacaaatacgcaaacaaaaatcaaaaccaaccaggctagaaagatggctcaacacttaagagcgcctgcagaggggtgggggtttaattcccagcacacacatagtggctcagggaatctgaagccctcttctggccactgcgtgaactgcatgcgcatgatacatgtgcatacatgcacacaaaatactcaaaacacattaaaaaaataagtctagcggtggtggcacacgctagcactcaggaggcagaagcaggcggatgtctgagtttgaggccagtctggtctacaatccaagttccaggacagccagggctactctgtctcagaaaaccaaataatcaaaccaataagactcctctacccccaaaaaacaaaaaagcaaaaaataacaactgggtttgggtttagctttgagataagattttactatgtatcccaggctggctatactagaactggttactatgtatcccaggctggctatactagaactggttactatgtatcccaggctggctatactagaactggttactgtgtatcccaggctggctatactagaactggttactgtgtatcccaggctggctatactagaactggttactatgtatcccaggctggctatactagaactggttacgtagaccaagatagcctcagactcacagatgtgactcacttgcttcttaactcccaagtgctggatttacgaccggtgccaccaagcctggtgtccccaaggctttttaatcctcctgcctcagccttccaggttctgggactggcaagcatgtgcccccacacagagttggcctggggattgtttattctatttttcattagttattattttgttgttgtttgagatgggatctttctacatatctcagggttgtctcatgtttggagcaatcttcttatattttattgtatgtgtgcctgcatgtgtgtacatgcgtgtgcgctcatgtgcatgtgcgtatgtgtgtgtgtatgtctgtgtgtgcatctgtgtgtgtgtgtgtgtgtgtattgtatgtgagcaagtgtgcaagctcatggagatcaaaagacaagtgtttagaatcaggtctctgctttcatcacatgggccccagggatgaggcgcagctcacctggcttgccagcaaacacttgtttgtttgtttgtttggttggttggttggttggtttttggttttttcgagacagggtttctctgtattgcctggcagtcctggaactcactctgtagaccaggctggcctcgaactcataaatccgcctgcctctgcctcccaagtgctgggattaaaggcgtgtgccaccacgcccagctcagcaaacactttctttcatctgctgggtcttctttgttttggggaggcctttctttttttttttttgttttgttttgttttgtttgctgttgttgttttgttcacacattaaaaaaaattaaaggttcactttgtagctttttgtttatgcccatatgcgtattcacatttgtgtgggaacgtccttggagaaagcaggagcaggagttacagacagttataagctgcctgacctgggtgctgggaaacacctcaggtcctctggaagagcagtaagtccccttaaccaatgaaccatctatccgtccagcctacatttaatttgttttcttatttactttgtctgcatgtgcatgtgtgtgcatgggacactggatgcctgtggaggtcagaggtcagtcttctctccttccatccagcgacgctcggggactcatatcctcaggcttggcagcaagtgcttccttgtccccttagtcagggattctccatgtagccctggctgccctgcaactctcaatgtagaccaggctagcctcgaactcacagagatccatctgcctctgccttccaagtgttagggttgaaggcttgcaccaccacaggccttgctttgggtttttgagagtgtctacagaatgctgggaggtgaggaatagccttgaacttctgatcttcctgcctcccaagtgctggggttacagtcatgcgccaccaattcctggcttttgcagtgctggtgatccaaactagggcttcatgcaagcgaggcaaacacggtatcccagttcctgggaatgtggctttaacatggattcatttattagcagggacctgggacctgaagacactgccttaccaagcatctcctctgtgaaatagaagagaggagaaatattaagatcctgggaagggggcgcttccctgtgtgacagtggtgcgtgataaccaggctggcagtgccctctgcatcccacattgggaacagcagcctgatactccaaggctgccatgaccctgaagatcactggaatcaggaggaaagtagaatccacaatggaagagttaaggctcttgggtaagagtgggagaaaatgggggtggggggtggggacactgcagaaacctgggagaaaaaaaatccaactaaaatcaggaaacacatggaggcacaaatttgctaatctttctttaaaaaactgtttcaggagatttattttatgtatgtatgtatgtatgtatgtatgtatgtatgtatgtatgtatacgtgcacctgtgtgtgcttggtgtcagtggggctcagacatcacctgattccctggaactggagttacaggtggctataagccaccacttgggtgctgagaacagagtccggggcctctggcagagcagtcagtgcttttagccactgagccatctctcattccccccaattatgttcatcttgagttgggcaggtacggtggcggaataggcctgtaatcccagcagtcactggaccatcatgggttctacatattaaacctttatgttaggtagggtcacacagcaagatccggtcacaaaaccagcaacaacaaaaccaaaaggagccagcttcttcccacaagcattctttccctcaggtcttcagctccatctgacagctactcggctggtggtcctatcctttctgagcctagttgccagagaaacaagcccggttcatcttcatgactagcacatctaatgataagcacaggttgactcaaggtgccatagggtgacactaggtacccagagcgacagaatgacacctatgagtgcacgtcgttaatcacaaacacacacacacacacacacacacacacacacacacactcatgcacccacctgcaaacacaattgcagccttctggacgtctcctgtcacagccccacctccttcctgatacactgcgttaagtggtgactgtaacaaaatgacttcatgctctccctgtcctgagccaaattacacaattatttggaaagggctcaaaatgttcttcgttagaagtttctggatacaccaatacacaggagcgtgcaccctcagaacacatgtacactttgacttaatctcacgggtgacacaccgacgcttacactccccctagcccacagaggcaaactgctgggcgcttctgagtttctcactgccaccagctcggtttgctcagcctacccctacaccccacgcccgggaatccctgaccacagctccacccatgctctgtctccttcttttccttctctgtccagccgtcggggttcctgggtgaggaagtgtctccacggagtcgctggctagaaccacaactttcatcctgccattcagaatagggaagagaagagaccacagcgtaggggggacagaggagacggacttcgagaggacagccccaccggcgcgtgtgggggaggcaatccaggctgcaaacaggttgtccccagcgcattgtctccgcgccccctggcggatgctggtccccgacgggctccggacgcgcagaagagtgaggccggcgcgcgtgggaggccatcccaaggggaggggtcggcggccagtgcagacctggaggcgggggccaccaggcagggggcgggggtgagccccgacggttagcctgtcagctctttgctcagaccggcaagagccacagcttcgctcgccactcattgtctgtggccctgaccagtgcgccctggtgcttttagtgccgcccgggcccggaggggcagcctcttctcactgcagtcagcgccgcaactataagaggcctataagaggcggtgcctcccgcagtggctgcttcagcccagcagccaggacagcgaaccatgctgcctgcggcccgcctccagacttattagagccagcctgggaactcgcatcactgccctcaccgctgtgtccagtcccaccgtcgcggacagcaaccacagtcgtcagaaccgcagcacagaaccagcaaggccaggcaggccatggggctctgggcgctgctgcccagctgggtttctactacgttgctactggcactgaccgctctgcccgcagccctggctgccaacagtagtggccgatggtggtaagtgagctagtacggggtccgccacttgtcctggggcaaagagccaggcacgggccttacccagctcccacgctgtggggatcaccaacctacagacccccctcgtgcattgtgacttcacatccagggtgctcacacctagaactagctctgctgaagtgggggcacatcattggcatgcagaagcccagatacaccaggctcagagaccattcccatttaatacgaccccgtttctgctgagcaacaggtcccaacctcgctgtggtgggtgctcaggtgtcccttaggtcttgaaccaaaaaaaaaaaaaaaaaaaaaaaaaaaaccagatattagctttgaggtgagggagtggaattcctaagtttttcaaggtgggcaaggctgcaggtggggtttctcctcgggggctgacttgaagaaaggaagagctaaggtagccatgccttttctgtccactcactagactctggagctcagggccaggcaaggatagggtggtacagcctgtatggttaggatgcaggtcccctcccctggactgaacccttatgcatcccgccaggggcatcgtgaacatagcctcctccacgaacctgttgacggattccaagagtctgcagctggtgctcgagcccagtctgcagctgctgagccgcaagcagcggcgactgatccgacagaacccggggatcctgcacagcgtgagtggagggctccagagcgctgtgcgagagtgcaaatggcaattccgaaaccgccgctggaactgccccactgctccggggccccacctcttcggcaagatcgtcaaccgaggtgggtgcccaggaaagcgacgcttccgggattaagggaaaagcagggtcatctccagggcataggcgggcgaaggcagggaagacatcccagggttatatgtgatcaaactgagaatcgcctggtgccggcagttaccgtaggtcagcaccagattctttctagccttgcgttgtgagcatgatctttaacgttgctgagccactggcccacagaaagggaattccggatcgtgggcgctgggcgacagctgtttttccctagccttcctcaaaggtacctgggaagctgatctctgagggctagctagggttgtgcttcgcacccagcaaagtttgcactgccaatactagtagcgatcttggctatgcagatttgttctacttgggaatctccccttggagctgctctgctaaggctctggagtctcagtaaagcttagagaggagggcattccatgcttcgcacacatgactccaaggatgttggactgtagggtaccaagtcttccaaacagggtgctgagttggccccacgccttctctcaactgatgcggggtcgcttcacccacaggctgccgagaaacagcgttcatcttcgcaatcacctccgccggggtcacacattccgtggcgcgctcctgctccgaaggctccatcgagtcctgcacctgcgactaccggcggcgcggccctgggggccccgactggcactgggggggctgcagtgacaacatcgattttggtcgcctctttggccgagagttcgtggactccggggagaaggggcgggacctacgcttcctcatgaaccttcacaacaacgaggcagggcgaacggtacgtcggtgtgtccggaaccaatggcaggggagatgtaagacaggtgcacggggacagaggcacagggaaggggcttcccgagagagtgggactctaggagggaagacagagaagaggtggtggttgagggcaaagaggttcctgagctgatgacagaacagaagagattagcaggctatcaacacgtgggatgtattgagatggctccatggcacacttttgaaagataaaagtgacttgctggcgtggagcagagtctggccgaatgtccctatctcagcgggccattttgcacttcctctctcccgagcttagtcacacctggaccttggctgaagtttccacagcatcgacgtgacccgggtggggtgggggtggggaagtatgggtggtggttcgtgggatgttggctttgaccttttcttccctcctcccctcgtcccctcctcccccagaccgtgttctctgagatgcgccaagagtgcaaatgccacgggatgtccggctcctgcacggtgcgcacgtgttggatgcggctgcccacgctgcgcgctgtgggcgacgtgctgcgcgaccgcttcgacggcgcctcccgcgtcctttacggcaaccgaggcagcaaccgcgcctcgcgggcggagctgctgcgcctggagcccgaagaccccgcgcacaagcctccctcccctcacgacctcgtctacttcgagaaatcgcccaacttctgcacgtacagtggccgcctgggcacagctggcacagctggacgagcttgcaacagctcgtctcccgcgctggacggctgtgagctgctgtgctgtggccgaggccaccgcacgcgcacgcagcgcgtcacggagcgctgcaactgcaccttccactggtgctgccacgtcagctgccgcaactgcacgcacacgcgcgttctgcacgagtgtctatgaggtgccgcgcctccgggaacgggaacgctctcttccagttctcagacacactcgctggtcctgatgtttgcccaccctaccgcgtccagccacagtcccagggttcatagcgatccatctctcccacctcctacctggggactcctgaaaccacttgcctgagtcggctcgaacccttttgccatcctgagggccctgacccagcctacctccctccctctttgagggagactccttttgcactgccccccaatttggccagagggtgagagaaagattcttcttctggggtgggggtggggaggtcaactcttgaaggtgttgcggttcctgatgtattttgcgctgtgacctctttgggtattatcacctttccttgtctctcgggtccctataggtcccttgagttctctaaccagcacctctgggcttcaaggcctttcccctcccacctgtagctgaagagtttccgagttgaaagggcacggaaagctaagtgggaaaggaggttgctggacccagcagcaaaaccctacattctccttgtctctgcctcggagccattgaacagctgtgaaccatgcctccctcagcctcctcccaccccttcctgtcctgcctcctcatcactgtgtaaataatttgcaccgaaatgtggccgcagagccacgcgttcggttatgtaaataaaactatttattgtgctgggttccagcctgggttgcagagaccaccctcaccccacctcactgctcctctgttctgctcgccagtccttttgttatccgaccttttttctcttttacccagcttctcataggcgcccttgcccaccggatcagtatttccttccactgtagctattagtggctcctcgcccccaccaatgtagtatcttcctctgaggaataaaatatctatttttatcaacgactctggtccttgaatccagaacacagcatggcttccaacgtcctcttcccttccaatggacttgcttctcttctcatagccaaacaaaagagatagagttgttgaagatctcttttccagggcctgagcaaggaccctgagatcctgacccttggatgaccctaaatgagaccaactagggatccaggtctcctgagagaaaagcctgctcaaaagctcctgcagggctcttcctcctgttctggcagcagctggttaagtgatgaggacaagtgtgtcacctgatggggactcagcacaccaacagtccagctctcctagtgcaagagctggggaggtagcagcaatgaaaggaaaggatagccatgactacatcctgagagggggggggggaagctcaagcagaaagggtgtcattgcccctgggaggctatcaaccttttctgcagtctgagctttgagcagtggaaggcccacctcttacactcttcctggaaattctttattagcaacccaaccctaacctacaggtaagggacatccaggaacaagccatgggttagagctggaaagatggctcagaggttaagagcactggctgctcttctagaagtcctgagttcaattcccagcaaccacatggtgactcacaaccatctgttaatgggatctggtgcactcttctggtgtgtctgaagacagctatggtgtgctcatataaataataataaagaaatgatattaaagaaaagccatgggttaacagtgggccctaaacttgaactagaaaacttaaagatgctcatagggaagaagaaaagagcagaaagcttagcttctagacaggggtaaggcttagagctcaataaaaaaggaaccccaagagtgattggtccacaaccaaagcagtaagctaaccacacccacaaagagccagaatgaggattccttatgacctgcaggctacctctgtgcttgcagtcaccagtcagcaggaaaggaatccttctcagagtactcaacctgacgccagtcatttcttcctcccttccttgtccaaccagagccttagccctgactcagggaacactaaccctttccaatacctgaccttcatcatagccccttcccaccagagaggacccgaaaggcattgacagaagctacagaggacccccgccttcccaagagccataaccagtctcaatcagctcagagagtttcttcttcttcccaggatcctttgctgcaggctatcacctctggggaagggggggggggaagaggtggggggggaggggtgaactctgacccctgttggttttttgactctgtgagtgggtagagaagtagattcagggcctgctcaagccatttccttgcctttctctccactggcaaagctagcactgggtcagttctgatgagtggatccaacctgggatactggatgtctggatgtctaaaaggttctgggtctccagtgatgatcatccagaagagcctactcagtcctaacccaagctgagctatcagcccctcagcgctcccaaagtatgaagccattgggctgtcccagggcacaaatgtgtgtgtgtctgtgtgtgtgtctgtgtgtgcatgcctgcacatgctgtgttgcacgtgtgtgcctgtgtgtatgtgtgcatgcacgcatgtgcacatgcacgcttgtgtgtgtgtgtatgtgtgtatgtgtgtgtgcatgtgcacgtgtgtgcacgcatgtgcgagagtgtgtacgcgtgggctgctgtaactcaatgtatcagggagaagcagcagaatggaggaaccaaaccatcgccgaccaatctcacccaaatcctaacccaggaacctggaaactagtgtgctgagcagaggtgtctttcaggagttggaaagagagcaccaccacccccttttgcccaggtatttgacacatcttttgtcttcagtcttctcagtcccatttgccttgcttgacccttaattgagaatattcaaatatccatctttgttgtcgcttaaggaggggataggcttcaaatgacatagtgtctgtgacagcttgggttgtgtggacggctactgataccttttctgtactagcctctgtcaaatgctggcagtgcagcaatctacaagccagaggtccagccaggactcaaccaggccaacaaacactaacaggcatagagggaaagaccctcggtgtgcaggaaaggcttcagcacccttctcttccaggggctggaacttggaagaagtgtgccatgggaaaatgcagaacaaagccagggcccaacacaacatgcacaaataaaaggaaacacttcagataaaagtgctggaaatgtgtggcgtgatggtagagcacgtgtaaggacgagatgggttggatccccagccgtgtgtgtgtgtgtgtgtgtgtgtgtgtgtgtgtgtgtgtgtgtgtgtgtgtgtgtgaaggggctgtggggtctacaagtgttgcctaggagctgaggactcttttgtccctattacctgtgttatctgcgctgccctctcaactggatcagtagatcagtaaggaaggggggggggaggtgcgtacctagaaagagtctcagggctcagaacacaaggcgctgtccataagataatgaatgtcatcagaaatatgcctgacgcaccttcctgaggcttccacccactcctgatctttagatgccatgcaaatacacaccacaccggggacagggaccctggtcacagagctgacctcagtcagagctgttgcggggactgagtcctgaaatatcccaggggtggcggaaaagctgagaggaccaagacagccagcggggctgcacggtccctggggggtcagcaccgaacaccctgacactggcatctcggaaaaaccctgtcagtggtaactgcaaataccagagggtccaacccccccttccctacggccccaggcaggctcagtccttggctccagggaagaaaataagctgtctggctgtggtgtgagcaggaacatccgtgcagagctgcccaccaactcacccttactcagtctttccacaccatgccagggccgggcatgagacagaccacccccttaccccctcccccgtctgggctaaaagcagacacactgggttggtgagagagcagcaggttataaatatgcccaaggaactgccgccaactcgctcccctgtcatcccctgggagggggtagggtggggtgacacctaaaggaggagccagggctgccctattcagtgaggcccagagagaagtggagcctccaaccagctgctgaaatatttattgattttttttcctttacctttcccaggtgaatgtgccacctttgacgtgtgccctggacttttgtctaccccaccctccctggtatatggccttatgtccagcgtgaaagggctcaaagccctgggccatttccttacaccctcaagaaaatagcagactttttaattcactcactgagtggacatagtgaggtgcgcatgcgcacctgcagccccggcgcatgcacaccctactcctgggtgatcgtaccagctccagcctctgttctgcacgctgtgccttcaacctggcaacctcccaggggaagggaagggaagggaagagaagggaagggaagggaagggaagggaagggaagggaagggaagggaagggaagggaagggaagggaagggaagggaagggaagggaagggtgctatccagcactagtactgtgcagagtaggtatatgagaggctgagaataagacccctgactatgcttccccctttgctttgcctggtggataagttctttctcttcctctcctcctaaccatcttccgcgtgagtgactgctgtgtaccaacacgtaggaagggacaaccattctgtgggatgctgagggtatgaaccaggctactagagaatcctgactcccagacacttgctaagtaggtgcccatctaaggcaaaaggggcagccctcctcttccagggctgagcccctcccttctccatcctccctattaatcctcggaagtgaaggggccgtccctggcggcccttcagccctattgtggcccctcgccctcctcggctggcgtctaattaactcctcctgcccctggttttgtgtgccccccttactccaccttgtcggccccgcccctccgctcggtccgctccccccgacggacattccagtcaggccgggccagtgtgccagggcaaccagggccagaccgaggcctaatcccccctccacccggccgggctcagggagccccactcacctcccggctctctaggggctgctcggctctgctgtggcggagacacacaatcaggacaaaggcgcagcccccagggggctaactcagccttcacgcccaggttgtgcggcatttggggagtttaatgaattgtccatcacgcctttcagggcccgcccgtcagcctggattaatcttcggagccctggtggggcaggagacactaagcctgtatttattactctcccattgtcactaattgaggtaattatctgtgactctggcctggccaacaatgctgcattcactcctgggacctcgatgggcctggctcccactctcagcaccaaccctccctcccttcctctctaaaacgcgccaagggccaagatgggccctggagcatgttgggaaagtggacaacgttccacaatgttccacgttcacgtagtgtctcccaaagcctcctccactatggagcagtgttgaggagaaacctgggtctcctaaagttggtgagagaagagggcacacaggcttgacccgcagaaaccccaggccacagccagcctggcatgcttcattcctgggtaaatggcactaaagtctcacggggcctttcacatgtccctgtagcctacaggactctggagtgctagagggcacatactattccctgctagatgagaggttctggaagcagaagctaccagagttgccagagcggcaaagttggagaaagttaacaagaacaggatagggcgcaacagggagcagaagggcaggatgcagaagcatcctaggaagaagcaacccaaagtcagagcattccccagggatcacaccaatgtgaccatcaattagtgccatgcagcaagctggagaaaaacccaatttagagtagatgtcatatgaagatggccttctgggtcaagggaatattcctggagaacgtgtgtgtgtgtgtgtgtgtgtgtgtgtgtgtgtgtgtgtgtgtgtaatgcatgtgcatgtggtgtgtgtgtgcatgtgttgtatatacatgtatgtgtgtgaattcttgtgtgtgtgcttgtgtgatgtgtgcgtgtgtgtgtgtttaagatacaataaagaagagtagacttggatgagacttgattttgagattcttgatggcaaaaattatgttttgggtcactgttatttttataagatcctaatactttacctagaatgccaggctatatgaagcccgtacttcacaaccgttgcggcctgtcagatcttctcttaaatgtctgtcctccggctcttcatttacctagttcttggtcaaaagagatgtctagagcattcctggacagtcctgtcctggatggacaactgaccagctgaagcactaaggatcctggtagaactcagcgccaaagttcgaacagcgccacctcgtggcaaatcttgggagagcttctggagacactagctaagaggatagagccagcggctgcaggggctcaggctggacagcagccatcctccttcatggctgcgttgttgtcttcccggcttttattttaaattgtccctccattatttgaagtaatgtatcgtgcacttcgggatgtcatcaagtttcccatgtgctgaagataacagagaatacccggtccttttgcctgtaccccctgagtgctaggacttttacggggctaccatggccagtttatagagttttggggatcaactgtgggaccttgtgaatattagatgagtttctatcaactgagttacattctcctgcctcacttccctcttcttacacaaacctttttggaggtgttttccatgccaagatttcgtggctacagagtcaaacatgtaaatcaatgtatgtaaatcatattctagtaacaaatttcaaagggtaaccaagtcaacaaagatgccaggcatggtggcacacacctttcctcagaggatttgggaagcagaggagggtggatctctgggagtttccaggcagcttggtttaaatagagggttctaggtgagtgggggctatgtggtgagaccccatctccgatacagtcccaccatcactaacccacaccaaaccaaccaaccaaaaagagaaagcacagcaaaggtcacgatggagagccagggaagtattcagaactgaagtacaataagatactcccagctcaaaactctctgtcatcactcttttgattcttctcacaaaagatcctgtgtttctttagccagaggcagagcctcattgcttttcccatgttgccttggaattcctgggttcaagggattccccacccacaacccgccatgtagccgggactacaggtgtatgcgtctgccccatgtgaaggtcagatgcttgctttatgcttgccttcagtaacctcttcgtgaccaaggcctctttcttcccagggccttgttccctgtggaactcatgtcttctcacattctggacgcatctgtttcctcatcatctttgtgagaactacctcaaacatcccttcttcagctttcccttggcagagtgaccttgcctgcccgaactcttgaaatgctttgctggccatccgtgtatgcagtagaccaggcttgcacctgcatgaggacacaggttaggtgtctctcattttgccatccttgctagcaccagatagggacattatatgccctcatcaaatgatgaataagtggattcatggatgaagaagcagacgcatggatagatggatatggagaggcacttgaatggatgatagatgagatgtggatagatcagtaagtgcataggtaggatgcatggatagatgcatgcataggaaggatagataggtgagtgggtggatgggtggatggatggaaggatgactggatgggtggatgggtgatgattggatggataattgggtggattgatgggtgggtggatggatggatggatggatgattggatggttaattgggtggattgatgggtgggtggatggatggactgatggagcatttatccacagatgacttgtatatcctagttaatacaaggagattcaaagaagggagcctacccccatggcatgccatgaagaggcaggaacacccctagtttaaatttttctctctatgtgcacccttgaagacttgtctcccagaggcatttgtggctatatcccattccctatgagtccaagtcaaggaggtgtcctcctcccacttctttccataaaatatggaagagttcacaaatttgaatgttggccttgcagaggcactgcgctaatctcctctcagctgctccaaatttagtgtaaaagtgatctccccaaaggtagaaggtgtgcccgagtctcctcgatgtccctggaacacatggttagtgggcaagtggacaactgagtaattactgagagaatactaccctgtcctcaacgaacactctgtgcacacatcccaggaccctgcattgagcggctctcctctcttgcaaacacatccacattactgatctctgttttgttttgttgttttttggtttttctgagacaggtttctctgtatagctctggctgtcctggaactcactttgtagaccacgctggcctcgaactcagaaatctgcctgcctctgcctcccaagtgctgggattaaaggctgtgccaccactgtgctcactgatctctttgatgtcccagttatagctcttgggttccccacccatttgtagggggacccaggacacctcagagctctcccaagtctaaaaagggcagggttcctggctcccttaatgccttatcaagcacaacagaactcaggggcagaaaatgttcccaggaagaacttagctgtggggagagtcatggggtcccctgctaacctaagatgtgttgcccccaaaagagtagccctccaggacctgctgtcttttctcctgatcaagggggcagttccagggtgggggtggttgtgccctccttcagaaggctgggtagctggcagacacagctagatttagaagtcattttcacagcagggagtcgctaacctgccacccacagggccccatggggcctaagatactacttaccagggtctggccctgaaacctgcagacactcctctccttctctcccagaactttggcagctggctccgactctatccttggcaagctctggaagaaggcacgtgttgccctgacaccctaaatacccaaatgttcccccacacaaaatgggtggttgttacctaacctaggatatgcctttttcaatgctggggaccaaactcaggactgtgtacattctagccacacatgcatactaccattgagccaccaccacaacccggttccaaagggacttcttttttttttttggagacagaatcttgctgggctgaactgggataggctggaagttgctgtgtaaaccaggctgggctcaaactcatgaccattctcctgactccagttttcaagaaagtgcgccatgcctggcttccttctctctctctctctctctctatctatctatctatctatctatctatatatatatatatatatgttttattttgcctggatggcatgcagctcattatgtagaccaggctggccttgaacacccagagacccaccagcctctgccttctgagtgctgagattaatgatggagagtgccaccaatggagagtgccaccaaccgggcttctttccctaatttttatctacaagtcacctcctctgtgaactctccctggattttctaaaactaggatctcccttgattgactcttcctagaacttaacacaaccgtcctcactgtcagacaggccttgccatttctgcccttgagcccagcccagagtctagttcctaggaagtgttcagtaaatgctaggtttcgcttggcagcagaaaggactgcattggacgtggtaagacctttggtatctttgatctttgcccagggtgacccggcttccttggcctcatccaccaagagcaacaggaaatgtgtaggtttcagacaggatcgcaggtgaatgaatattcctgctgagctccgaccagtgaacgcccctagagttgggaaacccgagtaggagacccttatctgctgaatagaagccagctgtggctgtggtctgggagccctgccccctctgcgtcctgcctttgggtctctctgggtgtgatgtcaagctaattggaggctaaaagcctgagtggtttgagagcggtctaaggagttgcgggagttagggttaacgggagtagggacagagggatgggtcaccagacctggtgactgagtctgggcgaagcccccgctcctgcccagccgatggctaaatttacctagactgactcagcccttgcccggaatgaggggtgggggggagtgcaccagggcagagggaagagccggcaggggtgcggcggggggcaaggaagggagagtcccagccagggaacagggtggactagaagtttccaccagagaggagtcctcctccccctcacaatgagcgggaagaagtcaagaaggactgagggagggacacagtgggggataggtcagagaaagagagactccagagctgcataaaggggcgagtagatttattgggcgcctgctatgtgccaggcactgtgcaagacgccttatat

SEQ ID NO: 24 - DNA, 2379 bp, Mus musculus
gccacagcttcgctcgccactcattgtctgtggccctgaccagtgcgccctggtgcttttagtgccgcccgggcccggaggggcagcctcttctcactgcagtcagcgccgcaactataagaggcctataagaggcggtgcctcccgcagtggctgcttcagcccagcagccaggacagcgaaccatgctgcctgcggcccgcctccagacttattagagccagcctgggaactcgcatcactgccctcaccgctgtgtccagtcccaccgtcgcggacagcaaccacagtcgtcagaaccgcagcacagaaccagcaaggccaggcaggccatggggctctgggcgctgctgcccagctgggtttctactacgttgctactggcactgaccgctctgcccgcagccctggctgccaacagtagtggccgatggtggggcatcgtgaacatagcctcctccacgaacctgttgacggattccaagagtctgcagctggtgctcgagcccagtctgcagctgctgagccgcaagcagcggcgactgatccgacagaacccggggatcctgcacagcgtgagtggagggctccagagcgctgtgcgagagtgcaaatggcaattccgaaaccgccgctggaactgccccactgctccggggccccacctcttcggcaagatcgtcaaccgaggctgccgagaaacagcgttcatcttcgcaatcacctccgccggggtcacacattccgtggcgcgctcctgctccgaaggctccatcgagtcctgcacctgcgactaccggcggcgcggccctgggggccccgactggcactgggggggctgcagtgacaacatcgattttggtcgcctctttggccgagagttcgtggactccggggagaaggggcgggacctacgcttcctcatgaaccttcacaacaacgaggcagggcgaacgaccgtgttctctgagatgcgccaagagtgcaaatgccacgggatgtccggctcctgcacggtgcgcacgtgttggatgcggctgcccacgctgcgcgctgtgggcgacgtgctgcgcgaccgcttcgacggcgcctcccgcgtcctttacggcaaccgaggcagcaaccgcgcctcgcgggcggagctgctgcgcctggagcccgaagaccccgcgcacaagcctccctcccctcacgacctcgtctacttcgagaaatcgcccaacttctgcacgtacagtggccgcctgggcacagctggcacagctggacgagcttgcaacagctcgtctcccgcgctggacggctgtgagctgctgtgctgtggccgaggccaccgcacgcgcacgcagcgcgtcacggagcgctgcaactgcaccttccactggtgctgccacgtcagctgccgcaactgcacgcacacgcgcgttctgcacgagtgtctatgaggtgccgcgcctccgggaacgggaacgctctcttccagttctcagacacactcgctggtcctgatgtttgcccaccctaccgcgtccagccacagtcccagggttcatagcgatccatctctcccacctcctacctggggactcctgaaaccacttgcctgagtcggctcgaacccttttgccatcctgagggccctgacccagcctacctccctccctctttgagggagactccttttgcactgccccccaatttggccagagggtgagagaaagattcttcttctggggtgggggtggggaggtcaactcttgaaggtgttgcggttcctgatgtattttgcgctgtgacctctttgggtattatcacctttccttgtctctcgggtccctataggtcccttgagttctctaaccagcacctctgggcttcaaggcctttcccctcccacctgtagctgaagagtttccgagttgaaagggcacggaaagctaagtgggaaaggaggttgctggacccagcagcaaaaccctacattctccttgtctctgcctcggagccattgaacagctgtgaaccatgcctccctcagcctcctcccaccccttcctgtcctgcctcctcatcactgtgtaaataatttgcaccgaaatgtggccgcagagccacgcgttcggttatgtaaataaaactatttattgtgctgggttccagcctgggttgcagagaccaccctcaccccacctcactgctcctctgttctgctcgccagtccttttgttatccgaccttttttctcttttacccagcttctcataggcgcccttgcccaccggatcagtatttccttccactgtagctattagtggctcctcgcccccaccaatgtagtatcttcctctgaggaataaaatatctatttttatcaacgac

SEQ ID NO: 25 - protein, 368 aa, Mus musculus
MGLWALLPSWVSTTLLLALTALPAAANSSGRWWGIVNIASSTNLLTDSKSLQLVLEPSLQLLSRKQRRLIRQNPGILHSVSGGLQSAVRECKWQFRNRRWNCPTAPGPHLFGKIVNRGCRETAFIFAITSAGVTHSVARSCSEGSIESCTCDYRRRGPGGPDWHWGGCSDNIDFGRLFGREFVDSGEKGRDLRFLMNLHNNEAGRTTVFSEMRQECKCHGMSGSCTVRTCWMRLPTLRAVGDVLRDRFDGASRVLYGNRGSNRASRAELLRLEPEDPAHKPPSPHDLVYFEKSPNFCTYSGRLGTAGTAGRACNSSSPALDGCELLCCGRGHRTRTQRVTERCNCTFHWCCHVSCRNCTHTRVLHECL

SEQ ID NO: 26 - DNA, 24244 bp, Homo sapiens
cctgccattcaccagctgagtgatttggaggaaagtcatgggacaaggaagggtacaaaaagcacagagcctcagattcttcatttctaaagggaggcaggagacgatgggtcaagatgatctctgaggcccattctcattctgtaagtctgtgattttcaggtgtagatgaaagagctagcccacagggagagacccctggagtcgggagatgactaagagggagtccctgaggtctttgaagatgtgtacaaccgagttctacatctgaaagccttagaaattcccccaaccctgcagggagcttgggtgggtgaggtgggagcagagcctttgtggttctgtttttttgtttttttttttttaaattcacttcagggttaatcagtcttttaaccaacctacctaccaccatcctagcacccccaaagcactggagctatggagctgcccttccgcttcccaagatgtagttttatatttgcccttcaagactgccctttttatgtttatcctaacctgctattaccctataaaacactgagaggaggagagaggttggggagtgattttccctaaggccctcttaaaaggttggcttctttgttatgttttgggggtcacagaagctcaggctgccaagcctttcccagacttaaataaacatgctcaccatttgggtgtccaagccttcccctacaccaggccctgtggggaaggagggggaccctcacttcattttaggcaggggctctccggagccctgagaagacgagagacagcacccgcttagagaccaggcctctgctaccccaggatctagggctcctgggccagccttctgatccccctaactccaaccctccaggggtgaagctgtttgcacaagtcttgggaattcccctgcagatggcagctgcctattaaccccatagtccccagagcactgcccccatctctgggctgagcccccatgggtctttacacctcagggagtgaactccagtgggaaaccaggagaggcagccatgcctcccagaccaggccagcagtgacctgttctctgcctctccagccgttcttcacctgctcaggtgagcaacacctggagcccccacagcacagaggaggggactggctccccagcttcaaagtcatcagggtctttgttcccagctttggctcctgggaaccccagcaattaggggagcagatttaacccttaaacggttgggggcgtcaccccacccccgctgagacactggggacaccagcctgggcttgtccagccaagatggggggagagaaaatggtggagggaataggggggcgtttgaagcttccaggactgggggcatctcttgttcacaggtgcaacccagattaagctgagcggaggcaggaaaggggggccctagggtaggagagcagggacccagctgcctcgctggcagcacgcaggtggaagttaggcgcgcaggggcccagacgagtggccagacctggctcagagcggctccggggggggcggggaattccaggagaggcccctcccggagccgcgaaaccatcccttcccgcctccgcgcgcctcgccctgccgcccaccccctagcctccgcggcagcgccgacccgcccagccaggctcaccgcgcttgaggatggcgctgtggtgcggcaggcggccgccgccctcaagcgcggagcagttccagcgctggtcgcgcagctggtgctgacactcgtggaccgcgatgtgcagaccctgaagcgcggacgccgtcacgtcggggttgcgcaggcacaggcctagctgccgcttgctcaggccggacagcgtcaagcacacggtgttggccgtcagcggcggctcgccaggcaacttcaggcccagaatctcattgcttagagccctgggaaccaagaaggcgtctggggtctgcggtccagacccctccaactctccccaccccgggtcggtgtttctatggcctgggagacaaggggaactgctcaccgactgcacaacgccaggaacaggagacccgcgaggcccgagggcggaggccgcggccggggctcctccagcatgtcgaagcccggaggctccggtgggcagatcgatcaggacctgcgggacgggagacttgatgcgggttcaggaatagggcggctcgcttggggaaccaagtgacgcccttcttcgggctcctaacccaccggtgccaccctactgacccttctcattcctcctcaaacaaaacaagaagaaacaccccttgattcccagagtccctgaggcttggaggtcttaaagaagaagagtcaaggcgttgtcccagctcaggactcaagcgagcacccctggaaccttgcccaatcagacacaacgcccggcacacagacacacactcacttgcaaactcagacacacagactcacaaacacttgctccacaacctcgcctactgctcccttttccagggccccacgactagcttccccgccctcacagggctagggagagggatagggaggaggttccccaccacctaagggggtgtcacctccaggtgtcatcaagggcaagtaggctccatgagaaaggtctaagaatgagttccccactcacactgccccctccctgagcagcaaggaaagaggagaggctccaggtgcaggaaagatggggaggagagcctggctccctcctaaaagggaccgtggcacagactgagtcctcttccctatcccccaccttgcctaactacaagctcccctcctccatagtcgcccgtctggtcctcaccccttggctctcacattcattgcattctaaatctgggggcactcctttattctctgtgtctttatctctagcaatatctctggctctctatgcgtctctgtgcttctgtgggtggatgcgtgtctgtctgtctgtctgactacacacgtgcctgtctcttcctcgtgtgcacgtccctgccctccctgctttcccaggtctaattacctccagtggtttgggtgcggggtccgagacaggcacggttgggttgcctgggcttcactagtgctgcttaaaccgtggggagactgcgctgggttctgtccccttgtcagagccgcattcttccagggccgggccactcctcttcaccgcttccccagcgccgccgcggccgccgggaggaagggagggaggaagggagggagtgatcgagagagctagcaagccggcgagcaaaggactgggggctctggctttgctctcaccgagctcagggtggctctgccgggctgacggagctgcagcccctccccgagcctggggcttccccaccctaccctccactcccagccttgaccaggcgaatgcagcctccccctcctcccagcgcgcgcgcgcgcgcgcgcgcacacacacacacacacacacacacacacacactctctctctctcacacaccctctcccccgacgcctgggttcaggcttggccccactgaagaaggaggtggccagagttcctctcacctgatctggggtcgccaaggctgcagggagggtgtagtaaccttcctagggagccagaatggggcccagatggccacatctttcatcactcctctttgcgtcagtttctccaccaagatcagggtggctggaaggtgcctttgacaagatgaggatggagccagacagtctttgggcttctcggtgtgggacagtcacatgtggcacccacagcctgagcgcacccggggtactcagagcgggcaggagaagcacacgtctgggcagcttggttcccaccctcctccaagccctgcgcctgcccctttggaggggacagctttggcctcagagtttggccctagcagaggttcaagtagcaccaaagattgtcagcctgccccgatgcttccttgcctggcagggatgcttgccaacagaggtatcctacccttctcgggattcccccggtctgcactttgggtggcctggattcctgctccaagctgtagacttgcttcttatgggatgaggagggccttgggatccaaaattgagccaagcccaagggcagccgggaaagagcctggtcttggggtgcacaggcaaaggcaaaccgccttagggagacccagtggcagcgaacgggttaggcgccaccgtgctcccgcctgactcaccctcgaagctctaaccactgtgggctatttttgccagagaggggccccaggctttccagccgccccccgcccctgccagaccgcagcccaaggcacggctggccccacgcgccccaggcacattgactcagactgcccccaagcaagcagaggaacagggatgatacccacaaccacagtcacctcttccttggtggtggcgttgcagctctgctgggcagccagcctccagtctgtgctgctggaggtcctgcccgtgctgcaggggtcactgttggatagcgggcacagcagtctgagacaggagatcgagcaaacttacatctgttgggatatttacagatcacctttacgtgccaggctgtgagcagtctggggaggtgaaagtgccatggtccctgacactggacagcctggaccagactgcttttctctgattccctacctctgggatggggaagtgggagcactagagttcctgaccctccttcccatttagaggacaagagccaaaccatgtgtggttttggaggtcaccagaatctgcaagccccatctcatagttttcatccttacacctggattcatgatccccaccagtgtccttatcctttttcttgcagtcaccctgggattcctgccaggtccttggaagaggggaatgaggttgcctaagcctctcttctccatggggacctcatggacatttgtatttctccatgtgtctctgggtcccccttaggtttgggattattttttgccttctgattctacccttgtcaggctccagcatacagccaggtgccaagaaggggcgaggggcagaactactacaataggtttcaacttcctggtgaccctaggtctccccaagcaggactgttccaaatccaaggacccagagtcctgctccttctctctactgaagcccaactctgggacaagaggccacaggccggcagactgggtggcctgagctggcccgcagtgccctcagcccgaccggctggcctgagcactgacccgcaggcggctagagggcggtgggacaggcggggcctggagagggctgtgggtgcacacccattgcctaataccccaagcacgcggccagctccaagaaaggggagggacgggaaccagagagaccttgacgtgggtcagggccaatgacaggagggggaaagtggggggctttcatcactgcagggagggactaggagcaagctggttccccttcccctcaatgagaagagtggagggctgcccttcccatcctagggatggagggtgtaacgagagcaatgtgggaagaacactggggccctggagggcgggggtcaaagaaaagagtgggggcccctggagattgggggatgtcgagcaactgaggcggtggctaaagcctcagaagcctcctcctcctcctccccccatgtttgccttggcccggggtcccgggtgactcatctgttgctgagccgctgataggggaggccagacccggggaacccaaattataggcccaggagggatggatgcgcccgtggcggtgagctcagctgcgctgcccaccctccgcttaatgcgccttctgctgcagcaccgtaggccaccacctggaggcaccaaagggtctgcgggccgactgcatactggactctcaggaaggccccactttcagcagtccactccaacaaatccatgggattaccttagacagaattttgcccccttctgtactcaggcctaatggatgggctgtgccttcccagcccaagggggcagtgctgcctgcgggtgcttcaaaggagggtaggctcctctgcccacaaactctaaaccctggagccctgcttcctccccagatcccaaagtcaaggcaaagcccctctcccctctaacatctcacctctaaccctattccaggggggtggtttgctactgattttcaacttcaagcctttaaagtcatccacggtcaaaactgatacagagaaaaatgaagcagggtaaaggagattagtagtgggattctattttataaagggggagggaaaacaaactgaaggaacaaatacatggagagatctgaggaagagcattttagaagacagaaaagcaggtgcacagacccttagaaaggagcatgcttggttcaaaggattagaaaagaggccagtgaggctagtggggagaaattcgcaaggaagagagtggtaggcaatgaagctggagggctaggaaggaggcccctttactttgagtgacatggggtctcgctggaaaattttgagcagagaaatgaactaatcagacttctgttttaggaaagatggctctgggctgggcgcagtggctcatgcctgtaatcccagtactttgggaggccgacgtgggcagatcacgaggtcaggagttcgagaccagcctggccaacatggtgaaaccccacctctactaaaaatacaaaaattaggtgggagtgttggtgggcgcctgtaatcccagctactcggtacgctgaggcaggagaatcgcttgaaaccggaaggtggaggttacagtgagccgagatcataccactgcactccagtctgcacaacaagagcaaaactccgtctcaaaaaaaaaaaaaaagaaagaaagaaagaaagaaattggctctagtaattaaatcaacccttttgatttttgcagtaaaatggagcactgaaatggagcaatcttgggcagtaatgtggggtctaatgaagtttttgggtttttcagatgggtactattgcagcatgtctgcatgcttatgtgtatgttccaggagagagataagtggatgatgcaggaaagaaagaggggacagttgatatcatgattatttgatctaaatagaaagttgggtgcttgttttggcagcacatatactaaaattggaatgatatagagattagcatggcccctgcacaaggatgacatgcaaatttgtgaagcatttcatattttgaaaaagaaatgtcagccaggtcataaacagtgtgacccagatctaggggccttaccctcttgccccctactcctggtgtgtggaatgttggaacaaagcacagtggctcctttcctctcttcccacctctgcttgacaacagtcgtcaaagacagggcttccatattttccagccagcctcccaccctcacggtgttgtatcaatccaccaggccaaaagatgtgacccaggccccagtgggaagaaactcataagggataaaggacaggctccccgtgatacattgtccatttacttgagctatctatgctgggtgctctctgcagggactactggcttttggatctacggagggtgctggaccactacaccttttccctctggggtggatccttggaagggccagatatactaggctgggcaaaagggaagaaaaaagggaaagaaggacatttctttctaaaataacttccatcaggcttcatttgggttaatatgcatctcatttaaaacacaagtgcccgggaatattaatgaaacttacctggcatttattccttagagtgatttccctgccttagaagggaatcctagtcatttctgggacttgagactttaggttcaggcctggggaaatttctcagtcagaaggcatcctaaaagacaagggagatgaaaaaaatgagagctagaactcaaaagggaggcagaaaggcccaaaaaattatttttacccatcaattttgagaagggttcccagcctgtaattgctgcacactggcaagcagctggtaaggtcgaaagagcatgggctttgagtcaaattggtctgggttttaatctggctctaccattgattcatttattagacgtggaccttggacaagtgcctgatctatttttaattctgcaaaatggggagagagaagagatcttccctccttccaggggccatgtgtgtggtggtggggcatgataaccaggctggcagtgccccctattccccatatagggaaaagcagccactttttttttttttttcagatgaagtcttgctctgtagcccagactggagtgcaatggcgtgatctcggctcactgcaatctccacctcccaggttcaagccattctcctgcctcagcctcctgagtagctgggactacaggtgtgcgccaccacactcagctaatttttgtatttttattagagatgggattccactatgttggccaggatggtctcgatctcctgacctcatgatccacctgcctcggcctcccaaagtgcggggattataggcatgagccaccgcgcccagcctgtcacttcttcaataggaggcctaaatggccttgaagctgagtaggagtccctgggagagaagagaaaagtgtacaatggatgagatggtcacaggcactctgggtatcccagtgtggtgggaactagagctttagggaaagacagaaacttggcagaaacatccaaagagaagcaaacacatggaggcacaagtttcctcatctaggttcaatgtagccagcaacccttgtcttcccagtcctctccatcaccatacatacagtggacatccgcaccatttcccatcctttctgagcctaggcctcagagacttagccactccaggctgggttcacctcaataccatcttggttgtaggctcggctctctcccccaatgacatgcactggttgacacataccacagtgtgacacgccataggatgccacgaggtacaaagggcaacagaatgacgcatacacacatatttaatcttcccatgcacatgctcatccacccactccacacacagtccagacactctgcatccctcaatcatgcttctgagtctcctgtcgacagttgccacctccttcctgacacactgccccaggcggtgactgtgacaaggtgactccatgaccttttctgacttgagctaaattccaaaattctttggaaagtttcctaacatccttcgtcagaacaaggagtttctgcacgtaccaacacacaggaggatgcaccctcagaacacagcacattctcactcccacccatattcacgttgttccacttcacacacacacacacacacacacagccacttgtgcgcttcttctggcgcacatgagcaaactgcctgttgctttaggtttctctccaccgctaggctccttttggttagctcacccccacaactcatccccgggatttccctgaccacagccgcactcacgcccccgtctcccctttttccttctctgtccagccatcgggggttcctgggcggttaagcatctccccggagtcgctgcccagaaccacagctttccttccgacactcaggatgggggagagaggggacgtcggaggggcccggggtgacgtcgaggggacaaccccaccgcgggcggcgaggcgggctgggcccctggcgggctctccccgcagcacactctcgccgcgccccctggcggatgctagtcctcgacgggctccggacgctcagctgagtgaggcgggcgcgcgtgggagggtgtcccaaggggaggggtccgcggccagtgcaggcccggaggcgggggccaccgggcagggggcgggggtgagccccgacggccaacccgtcagctctcggctcagacgggcgggaaccacagccccgctcgctgcccattgtctgcgcccctaaccggtgcgccctggtgccacagtgcggcccggaggggcagcctcctcccgtcacttcagccagcgccgcaactataagaggcggtgccgcccgccgtggccgcctcagcccaccagccgggaccgcgagccatgctgtccgccgcccgcccccagggttgttaaagccagactgcgaactctcgccactgccgccaccgccgcgtcccgtcccaccgtcgcgggcaacaaccaaagtcgccgcaactgcagcacagagcgggcaaagccaggcaggccatggggctctgggcgctgttgcctggctgggtttctgctacgctgctgctggcgctggccgctctgcccgcagccctggctgccaacagcagtggccgatggtggtaagtgagctggtgcggggtcgccacttgtcccgcggcacagagccaggggccaaccctacccagctcccacgctctgggatccgtctgccgacaggctccctccccgctctgacttccctccgcgacaccgaagggcgatctggcatgaaactgccccagactccagctctgtacaagtggggcgaatgatccgcccgcggaggcctaagataccccaggcagggagcccactctcatctagcaccgcccttcccctttgagcgccaactccagcctcacggcggtggctcaccacaggtttccccacctcgggaagtgaagggccaggagttcgcctagaaaggaggggagaagagggtgggactcctaagcatttcacgccttgggtgggcaagaactgcaggccatgattatctcgctcaggctgaccggaagaggctcggagatccaaggtagacactcggtctccgggtacctcctctgtccagtctccggacctagggctcaggcgagcagccctgggactactgggcacacacaagtctggacgcccagttctttcaaattagtgagcctgggagagcgggtattattaatctcccgccattctctccagccacatacccccaggaagaggaccgggtggcacagtttttatggttagggtgcggatccccttcctgagcctgagctatcatacgtcccaccaggggtattgtgaacgtagcctcctccacgaacctgcttacagactccaagagtctgcaactggtactcgagcccagtctgcagctgttgagccgcaaacagcggcgtctgatacgccaaaatccggggatcctgcacagcgtgagtggggggctgcagagtgccgtgcgcgagtgcaagtggcagttccggaatcgccgctggaactgtcccactgctccagggccccacctcttcggcaagatcgtcaaccgaggtgggtgcccaggaaggcgacgcttccgggagcaggggaaacgcggggtcacccccagggcatgggcgggcgagttcagagaaggtgtcccaggcgcctggagggtcacacaatcaaccttgccaagtgcctcgtgcccagcgccagctcggggccagacttctaccaggcgttttccagccgtgcaccctggaaacgaagcttaacttttctgagctactgccccagataaagaaagtttcgggtcgcggacgccggctgaccgccgctttcccccagcctctctcaaaagcgcctgggaagctgctctctgcaggcgtgtgtctggcctctcgcccagcaaggcttgcaccgccaaaatgggccgaaagttttgggctgcgaagaagtcttggggatgtatggttcttccgctcccctctcttcggtttgtctctctggggctgctccacttccgctatcgagccaaaatgcgccctagaatctcccagtaaggtgtgattacgcccgtggacgtggctgcgtgcccacgcacctgctttctctactagccctagagaccagctttccagcactgccggccctggctctcaggactcaaagtgcggagtcgggggtgggattccggtcccaagcccttcatgagggtgctggccgcgccccgcgtaccccctcgctgatccccgctcccttctcccacaggctgtcgagaaacggcgtttatcttcgctatcacctccgccggggtcacccattcggtggcgcgctcctgctcagaaggttccatcgaatcctgcacgtgtgactaccggcggcgcggccccgggggccccgactggcactgggggggctgcagcgacaacattgacttcggccgcctcttcggccgggagttcgtggactccggggagaaggggcgggacctgcgcttcctcatgaaccttcacaacaacgaggcaggccgtacggtgagctttgagaggctccgcaccctaagcggagcggcaggggccaacctcgggctggggaagtgacggtcggtgagataaggcaaggggcaccaggagagggcgtcctgggagagccggaggcttggaacgaagacggagaatagaggagacagtggctgagggcaaaggtatgtctggcccgcggacaggtagaagaggttgcaaatcaagcacagtctcttcgctgtacagattcgaaaaataagcctgagaggccgagactgactcgccgcggcggagcagggttgggcagggtttccaaatctcagcggaacatttcgcgcctcccttcccctgggctcagctaggcctgggcctttgctgaggtccggcccccgtggcgtccgggagagggcagtgtctgggagggtgactctggcccggtgccctgggacactctttcttcccctatccccgcagaccgtattctccgagatgcgccaggagtgcaagtgccacgggatgtccggctcatgcacggtgcgcacgtgctggatgcggctgcccacgctgcgcgccgtgggcgatgtgctgcgcgaccgcttcgacggcgcctcgcgcgtcctgtacggcaaccgcggcagcaaccgcgcttcgcgggcggagctgctgcgcctggagccggaagacccggcccacaaaccgccctccccccacgacctcgtctacttcgagaaatcgcccaacttctgcacgtacagcggacgcctgggcacagcaggcacggcagggcgcgcctgtaacagctcgtcgcccgcgctggacggctgcgagctgctctgctgcggcaggggccaccgcacgcgcacgcagcgcgtcaccgagcgctgcaactgcaccttccactggtgctgccacgtcagctgccgcaactgcacgcacacgcgcgtactgcacgagtgtctgtgaggcgctgcgcggactcgcccccaggaacgctctcctcgagccctcccccaaacagactcgctagcactcaagacccggttattcgcccacccgagtacctccagtcacactccccgcggttcatacgcatcccatctctcccacttcctcctacctggggactcctcaaaccacttgcctggggcggcatgaaccctcttgccatcctgatggacctgccccggacctacctccctccctctccgcgggagaccccttgttgcactgccccctgcttggccaggaggtgagagaaggatgggtcccctccgccatggggtcggctcctgatggtgtcattctgcctgctccatcgcgccagcgacctctctgcctctcttcttcccctttgtcctgcgttttctccgggtcctcctaagtcccttcctattctcctgccatgggtgcagaccctgaacccacacctgggcatcagggcctttctcctccccacctgtagctgaagcaggaggttacagggcaaaagggcagctgtgatgatgtggaaatgaggttgggggaaccagcagaaatgcccccattctcccagtctctgtcgtggagccattgaacagctgtgagccatgcctccctgggccacctcctaccccttcctgtcctgcctcctcatcagtgtgtaaataatttgcactgaaacgtggatacagagccacgagtttggatgttgtaaataaaactatttattgtgctgggtcccagcctggtttgcaaagaccacctccaacccaacccaatccctctccactcttctctcctttctccctgcagccttttctggtccctcttctctcctcagtttctcaaagatgcgtttgcctcctggaatcagtatttccttccactgtagctattagcggctcctcgcccccaccagtgtagcatcttcctctgcagaataaaatctctatttttatcgatgacttggtggcttttccttgaatccagaacacaaccttgtttgtggtgtcccctatcctccccttttaccactcccaggcttggaagcttacctctctcaaacaaatagaatatgctgttgggggactggtttcctaaccttgccagaggaccctgagattctgacccttggatgaccctaacgaggccactgggaatccagctctcctgagagaggaacctggtcagtagccaaacaaccctgcagggttcttcttcctcgtggaacagcaactggctgtgtgatatggacaggtgcatatacttggtgaatgggggttaaacaacctcagtgcctgcttttcctgcctggaacagctgttcagaaaatagctactattgaatgataactgtgaccatcttccaaaaagtaggaagagaaactaaagcagagtgctgctgcccctaatgtggagctattggtccctgaagcttggcttcttcagctgtggtcagggcattggacaggggtgaagcccttccaccaacagaaaagtaaatactggcctggggcagtggctcatgcctgtaatcccaacactttgggagaccgaggtgggtaaatcgattcagcccaggagtttgagaccagcctgggccacacaggcagccccacctctacaaaagaaaaaaaaaaaaaaatatatatatatatatatatatatatatatgtgtgtgtgtgtgtgtgtgtgtgtgtgtgtgtgtgtatatatacacacactattaggtattatatatgtatatctatctatctatctaataaataccttatcaggagccccactcccaatcttgggctcagggagatccagataataggtgatgagcctggtgctggaccgagaagctcagagatgctggtgggagagaagggagcaggtaggctagaatccaaatgcaggctaggcttaaaccgatgtaaccaaaggaaaccctaatgtggtccataaccaaactactaagctagccattcccataaagaaccagaatgaggattttgttactaacaccaccagtgtgatacctctgtgtgcacattcaccagagtcagtgggagttctaatcctacccacggccctaaacctatctctaactctaaccctcttcctgttcctaggtctaggttgaaccttagccttaaccctaacttcagacaaacactaaccccttctaagctctaatgtctgtccctaatcctaacccctccccacaggggaggatcagaagggcaaggggagctgtgaaacacccaacctatcccctaagagcaacaactgctcccagccagcttgagaatttccccttctcccctattccctcctctcctgttcaggcctcttctgctgttggtgcctcccaccacctttgggatatgtgtaggggtaggggaatggagccaggaactgctcagtcctgcaacgacatccctttcccttcctttccacctgccaagctagcaccatctcagttctgattcctcaccctaggggaagaaataaaaacctattgatcctggggaagaggcacctgaaaagctttgggtttccataaagagcaccctgcagagaatgcccagtctataagccaaagggctattagatccctcaactccccaaataagaagttaataggctgccagaggtgggagggggggcttgggcccctgctggacagtgcccagagttgagatgaagcagcagggtagagtcaaagcattggcagctgtctccaactacttttgcctaaattcaaactctaagaattggagtcagtatcagctttcaggcttggaagctggggcactctgaaccaggttgacaaacaggagctggaggaagagcaagggaaagtggtgaattcttttctgcccctacccagactttcagcaaatctcgtactttctcagactcagttgccttgcctatcaaacagggatggttattgttacttaacctttcagggaggtgatgaggttcagatgagatgatgtacatgaaagcctgggtcatttgaatactcactgacacctcttctataccaggcatctgccaaatgttggcaatacaatgatttataaaccatagtgcctgcttggaggaggttgacagtctggccaggggatcaagcacatcctcagatattgttagcatatggagggagtgcaatgaaggctcaatgaagtgtaaagccttctgcacataaatgaagtttaagggcagactcccatactcaagccctcggcatggaggctcttctcttccaagggctggaatttcaaaggtgatggtgctgggaagtgcagaattaggctgggccctcaatgggcactaataaaacacaaacacacatacacacacacacaaacaagtaaaagggcagagggatctgcaaagcactacataaaagctaatcattttgttattgtgatcatctatgctatcctcacacagggctggagcgggtacatcctgaggagaagaacaattatgcatagaaagaagactcacaaaggtctcaggagccacagtaggctcagggtggtggccataggatggtgtcatcaggactgtgcttgatgcgccacctctcaccacctctgatcttcaggtgccagggcgctggatacacgttggcctgagcaagtgagggaaagactagtcctgaaatatcctggggggagtggaaaagctgagaagaaaggcaggctgtgcacagtccccagggggtcagcaagccagcaccacacacactctgccacacgcaccctggaaaaaccctgtcagtggggctgcaaataccctagggtccagcctcccccaaagcctcccccctcgccccaggctggctcagtcctcctctccagcgcagagggagaaaaataacaaaacgaggagaaaataagctgtttggctgtggtgtgagcaggaatatccatgcagggctgcccaccactcacccttactcactctttccacacccagccggggcgcccagcatgagacagaccacccccctgccccctcccccgtctggtctaaaagcagacgctggtgagcgagcagcaggttataaatatgcccagggaactgccgccaactcgctcccttgtcatcccctgggaggggcagggtggggtggctcccagggaggagccagggctgccctgttccctgaggcccaggaggaagtggggcttcctagaggctaccatattttccccccttttcaaggtgaaggaaccactgccactccattttccctgaacatttgctcatctcttcagatatgtggtccctaccctccctgggccctggctggaggctcggaatgaaagggcccaaagtactctgtgtcatggcacagcccgctgctacttctcttcttcacatgcatttgctctcagcaaaacagaagttcattcattcattcaacaagcattaactgaaagccagctgaatgccagaccctgtgcacaggcccacctgtgtgcacagtgtctgcacacacaggtgcaagcacacacagctgcccctactccatgtgctcacatcacctccagcccccactaaggacttcctggcttcaacctgccagcctcatcaggaaagcaaagcttcaagctcctggttgtgcctcagagtaggttagggggcatggggtagggggtggctgagaacaggaccccaaacacttctgcttccactacttcccctgtaaatgagggggtcctttctctccttcctgcccaatcatcctccctaagtaggtgccatgtgacgaagaaagagccattcttgggatgctgagggtacctgtccaggccaccagagcctcccacctcccagcaacttgccaactaggtgccaagctggggcaagagggggcacttccaccctgtgaagctcccagctctcctcccccagggctgaacccctcccttttccctcctccctattaatcctcggaagttaaggggccgtccctggcggcccctcagccctatcgtggcccctcaccctcctcggctggcgtctaattaactcctcctgcccctggttttgtatgccccccttaccccaccttgtcggccccgcccctctgctcggccagctcccccccacggacattccagccaggccgggccagtgtgccagggcaaccagggccggaccgaggcctaatcctcccgccgcctggcccggctgggggagccccactcacctccccactctctgggggctgcccggctctgctgtggcggagacacacaatcgggacaaaggcacagcccccagggggctaactcagccttcacgcccaggttgtgcggcatttggggagtttaatgaattgtccatcacgcctttcagggcccgcccgtcagcctggattaatcttcggagccctggtggggtaggagacactaagcctgtatttattactctcccattgtcactaattgaggtaattatctgtgactctggcctggccaacaatgaggcattcactcctgggacctcgatgggcctggctcccactctcagcaccagccctccctcccctcctcttccaaacccgccaaggactacgatgggccctggagcatgttgggaaagtggacagcgtcccacaatgcctcacctccccaccggcgtctcccatagccatcactacagagctgtctcctggtccccccagagaaggtgagaaaagaaggcagcctctgccaggggatggatttggctggcagagccctcaggccagagagggacctgtttctgaggactttggttttctggactctccaactcctcatctccagatgcatgacaccagggtctcacaaggtgcttttgcagatccatcctcatgtccctatagcctctagggtgttaagaggctctagcctgtaccaggcctactctggggaggtccctaaacctaccagtgctggcagagtggctgtggatgtgatgggagatgttaagagagacagcaggaaaggttctgtcaggggaagagcaaaaggagccaagtcaagaaggagcagtcaagagtcacagcattcccgggggtcacactaatgtggccatgcagcaacttcagggagaaacttggatttggaggggcaagagttccaaagagcggatttcacgtggagacagctttctgggtcaaggtggttggccctggggagcaggtatgtgtgtacaagaaagacagagagagagagagagagagagagagataagaaaggaagatttaggcagaactagattgtgaactccttgagggcaagaactatgtctttgtgtcttggtcactgttgcttttatgagagcttaacattgtaccttgcacgtaataggcaccgtcaagtgaatggatgaatacagatgaagccggcacttgctttaaaactgggatctgtgagctattctcttccacagctgcactcaggctcctcattctctcaggacttgctggaaggagatgtctagaccatccctggacggtcagcggtgggcacttcaccagctgttgacacgacagaccctggccgaactcagagcggtagtggggatagcgccaccttgtggtgactcttgggagagctcctggagagacgctagccaagaaggcagggtcatctctcaggagcagggtatcaccccgggctgcagccatccttcttcctgtatgtctgaactgcattgttatgccagcggtcctgtggcacagttttatcatttgttccttctttattccagcattttctgagagcctgctccacgccaaacttgtcgggtatacagagctaaatcagctaaatcacctccagcagctcatggtccagcaggggattccacaaggtaacaagaccaacgaggttacgatcaagccgcaggaaaaaaaattatccaggtgttgaggaggcactagaacattcccagctcaaaaactccatcattcacctctccctcaattcctctcaccgaagtgcaaatggtttatcttcattaccaagaaacagtctgggcatggtggctcacagctgtaatctcagcactttgggaggccgaggcgggcggatcacttgagatcaggagttcgagaccagcctggccaacatggtgaaacccgtctctactaaaaatacaaataaaaaattagccaagagttatggcgcccacctgtaatcccagctactctggaggctgaggcaggagaatcgcttgaacccaggaactggagcagagatcacaccactgcactctagtctgggtgacagagtgagactccatatcaaaaaaaaaaaaaaaaaaaaacccaaaaagcaaaaaagacaagaaatacttcaagttctggctcccacacatctttccaggactcactcttctgccccactgcattccctaatgcctctgctccctgtgaaagccacgtgttttcctacctctctgcattttcccacctctctgcattttcccacatcctagaatgtcccccttccctgtatcccactgttggaacccatctcagatgttccttcctccatgaagactcttctgatttcccttggtagagtggtcttgcctgttctagctcctgaagcaccatgtaggtaggtgctttcattagcagcacatactgggtgtcccattggtggttgtctgtgtatattactcatcctcctactaggctagcccttgcagcactgacctgggcatatcatatgcctttgttaaatggtgaatagacggatacatgaataaatggatgcacggacagaggaataaatcgatggaagtataaatggggccaggcgcggtggctcatgcctgtaatcccagcactttgggaggccaaggcaggcggatctcctgaggtcaggagtttgagaccagcctggccaacatggtgaaaccctgtctctactaaaaatacaaaaattagccaggcatgttggtgggcgcctgtaatcccagctactcaagaggctgaggcatgagaatcgctagaaccctggaggcggaggctgcagtgagcagagatctcactaatgcactccagcctgagtgacagagtgagactctgtcttaaagaagaaaaaaagtataaatggccagatagatgacaaataggttggtggatgggtggataagtggatgtggaatgtatagatggatgggtgggtggatggatgaatagatggatgaatggaaaatctatccataaaaggactcacaaaaggctatgtaggctgagtgcagtggcttatacccgtaatcccaacatttggggaggccaggatgggagaatcgtttgagcccaggagtttgagatcagcctgggcaacatagggagaccccgtctccaccaaaaaaaaaaaaaaaaaaaaattagcccggcatggtgacacgtgcctgtggttcctactattcaggaggctgaggtggaaggatcacttttgctggggaggctgaggctgcagtaagttgtaatcgtgccactgcactccagcctgggtgacatagcaagaccctgtctcagaaaaagaaaaaagaaaaaaaatggccagatgtggtggcccatgcctgtaatcccagcactttggaagggtgaggcaggcagatagcttgaggtcaggagttcgagaccaccctggccaacatggtgaaaccctgtctctactaaaaatacaaaaattagctgggcgtggtggtgcgcggctgtaatcccatccacttgggaggctgaggcagaagaattgtttgaacccgggaggtggaggttgcagtgagctgagatcgcaccactgcactccagcctgggtggcaggaaagaaaagaaaattttaaaaaagcccaggtagcaccagaggcttcaagggagggagcacaccccatgctaggatatgcagaggcagaggcagtatccaggccaaactttccttcactaacatctgcaccctcagcaacttgtctcccagaggcctagatacattccactccccataagaagtcatggtctgggagctgctcctcttttcatcctccctggtccctcaggaatgctttcattaacatatattatgccatcttcctgcactgcaatgactgtgggtttcctcttccacatctctttccctatatcatacacaccctagcttgagagctccctgaagggaggaagcatgcctgagtctcttttgtgtccctagcacctggcatatatgtttaatgagtgagtaaacaaatgaacaactgagtgagtgctgcctcttccccatagacacattttatacacttcctgcgtcctcttgttcagttatctctcctggccctctcctccttacacacatcacactcacactcctgaccttgacactctgaaattccagagttatatgctggggctcggtttccttacctatttgtggctgatctagggaagtcccagccctcccctgagagtctgaaagagacggctcttgactcctctaaagccatattaactgggtcccatggagggcagaaaggggcttccctaggaagaagctctctattgggagggtagcaggatcctgcactaacctgaggtctgctgccccaaattgaccacatcctcctgtgtctgctgtccctactcctgaccagtgaggctgtcccaaggtagggggtggttgtggcctctgtctcaaggctggctggcagacacagccagatttagaagtcattttcgcagcagggagcctccagtgtgccacccacagagccctggaaggtcagtctgagatatggctcaccaggggctggcccctagacctggagtcactcctccccttcttgtctctctcctttttttgcccagaattttggcagctggtgctgactctatccttaggcaaagatggagtaagttctgggggaaggggtgtgctgcactgacactctaaccgcccaagcactgccagggcaccattcacccaggcactattcacccaggcaccattcacccattaaaagggctgtccatacccaccccaggtttcccccctcctctctactgacatctgctgcctggttctcctcctcccctacttttttttttttttttttttttgagacagtgtcttgctctgtggcccaggctggagtgcagtggtacgatcttgcctcactgtaaactccgcctcccagagtcaagtgattctcctgcctcagcctcccgaatagctgggattacaggcatgcatcaccacacccagctaattttttttatttttagcagagacgaggtttcaccatgttggtcaggctggtctcgaactcctgacctcgtgatccacccacctcagcctcccaaagtgttgggattacaggagtgagccagcgcacccggcctttttttttttttttttttttttttttaagacggagtgtcgctttgtcgcccaggctggagtgcagtggcctgatctcggctcactgcaacctcctcctctcgggttcaagtgattctcctgcctcagcctcccgagtagctgggactacaggcatgtgccaccacacctggctaatttttgtatttttagtagagatggggtttcaccatattggccaggctgatctcgaactcctgacatcataatccaccggccttggcctcccaaagtgctgagattacaggcatgagccaccacacctggccgtcctcccctacttctaattctctctgtcccatcatcctgttctcataccccaacactaataaaatagccctagggagaaataataatcagagctaacacttaatcacctactatgtaccaggtgttgttttttcttttcttttcatttttttttctttttaattaaataaatttaaaaaagagagagagagagacagggtcttgctatgttgcccaggctggtctctaactcctgggctcaagcaatcctcccacctcaacctcccaaaatgctggtattacatgggtgagctactgtgcctggccaattgttctaagtgtttt

SEQ ID NO: 27 - DNA, 2367 bp, Homo sapiens
gcggtgccgcccgccgtggccgcctcagcccaccagccgggaccgcgagccatgctgtccgccgcccgcccccagggttgttaaagccagactgcgaactctcgccactgccgccaccgccgcgtcccgtcccaccgtcgcgggcaacaaccaaagtcgccgcaactgcagcacagagcgggcaaagccaggcaggccatggggctctgggcgctgttgcctggctgggtttctgctacgctgctgctggcgctggccgctctgcccgcagccctggctgccaacagcagtggccgatggtggggtattgtgaacgtagcctcctccacgaacctgcttacagactccaagagtctgcaactggtactcgagcccagtctgcagctgttgagccgcaaacagcggcgtctgatacgccaaaatccggggatcctgcacagcgtgagtggggggctgcagagtgccgtgcgcgagtgcaagtggcagttccggaatcgccgctggaactgtcccactgctccagggccccacctcttcggcaagatcgtcaaccgaggctgtcgagaaacggcgtttatcttcgctatcacctccgccggggtcacccattcggtggcgcgctcctgctcagaaggttccatcgaatcctgcacgtgtgactaccggcggcgcggccccgggggccccgactggcactgggggggctgcagcgacaacattgacttcggccgcctcttcggccgggagttcgtggactccggggagaaggggcgggacctgcgcttcctcatgaaccttcacaacaacgaggcaggccgtacgaccgtattctccgagatgcgccaggagtgcaagtgccacgggatgtccggctcatgcacggtgcgcacgtgctggatgcggctgcccacgctgcgcgccgtgggcgatgtgctgcgcgaccgcttcgacggcgcctcgcgcgtcctgtacggcaaccgcggcagcaaccgcgcttcgcgggcggagctgctgcgcctggagccggaagacccggcccacaaaccgccctccccccacgacctcgtctacttcgagaaatcgcccaacttctgcacgtacagcggacgcctgggcacagcaggcacggcagggcgcgcctgtaacagctcgtcgcccgcgctggacggctgcgagctgctctgctgcggcaggggccaccgcacgcgcacgcagcgcgtcaccgagcgctgcaactgcaccttccactggtgctgccacgtcagctgccgcaactgcacgcacacgcgcgtactgcacgagtgtctgtgaggcgctgcgcggactcgcccccaggaacgctctcctcgagccctcccccaaacagactcgctagcactcaagacccggttattcgcccacccgagtacctccagtcacactccccgcggttcatacgcatcccatctctcccacttcctcctacctggggactcctcaaaccacttgcctggggcggcatgaaccctcttgccatcctgatggacctgccccggacctacctccctccctctccgcgggagaccccttgttgcactgccccctgcttggccaggaggtgagagaaggatgggtcccctccgccatggggtcggctcctgatggtgtcattctgcctgctccatcgcgccagcgacctctctgcctctcttcttcccctttgtcctgcgttttctccgggtcctcctaagtcccttcctattctcctgccatgggtgcagaccctgaacccacacctgggcatcagggcctttctcctccccacctgtagctgaagcaggaggttacagggcaaaagggcagctgtgatgatgtggaaatgaggttgggggaaccagcagaaatgcccccattctcccagtctctgtcgtggagccattgaacagctgtgagccatgcctccctgggccacctcctaccccttcctgtcctgcctcctcatcagtgtgtaaataatttgcactgaaacgtggatacagagccacgagtttggatgttgtaaataaaactatttattgtgctgggtcccagcctggtttgcaaagaccacctccaacccaacccaatccctctccactcttctctcctttctccctgcagccttttctggtccctcttctctcctcagtttctcaaagatgcgtttgcctcctggaatcagtatttccttccactgtagctattagcggctcctcgcccccaccagtgtagcatcttcctctgcagaataaaatctctatttttatcgatgacttggtggcttttccttgaatccagaacacaaccttgtttgtggtgtcccctatcctccccttttaccactcccag

SEQ ID NO: 28 - protein, 366 aa, Homo sapiens
MGLWALLPGWVSATLLLAALPAAANSSGRWWGIVNVASSTNLLTDSKSLQLVLEPSLQLLSRKQRRLIRQNPGILHSVSGGLQSAVRECKWQFRNRRWNCPTAPGPHLFGKIVNRGCRETAFIFAITSAGVTHSVARSCSEGSIESCTCDYRRRGPGGPDWHWGGCSDNIDFGRLFGREFVDSGEKGRDLRFLMNLHNNEAGRTTVFSEMRQECKCHGMSGSCTVRTCWMRLPTLRAVGDVLRDRFDGASRVLYGNRGSNRASRAELLRLEPEDPAHKPPSPHDLVYFEKSPNFCTYSGRLGTAGTAGRACNSSSPALDGCELLCCGRGHRTRTQRVTERCNCTFHWCCHVSCRNCTHTRVLHECL

SEQ ID NO: 29 - DNA, 63079 bp, Mus musculus
  misc_feature (1)...(63079): n = A,T,C or G
atgggattagtaatctgcactgcctggcttttgtgtggatgagacctttggtccttcctgcacagcagatgccttgctgcctggtctctctcaggctctctctggttattttgtcttctctgaggaggtccagaaggagtctttgaagcccttgggagaagagctgaattgaatttggggtgagtatatcccccaggtttatgtgttgagatcttggccttctaggtagtggtattggagaccattaagaaatgatgcccaagagctggagagttggctcagcagttaaggaacacttgttgctcttgtacagaacccagtttgtgctcataggatggcagctcccaactgtctttaactccagtactagaagagccaatgccctcttctggcctctgcaggcactgcacaaaagtggtgcgtagccatataaaatataaaaataaatgaaaaaagaaagaagggctatctaacgcaggcttgggggttaactcctgaaatcccagcatagaacatgtgccttttctaacaacaatgacgttaaatgagaaatcaataagtatcagctgggtatggtgaaacattcttataatcacagttctcaggagattggagccggaggattgccaattcaagggcagcctgggctacagaatgagagcctgtctcaaagatatgctgttgtttcgcctttcctggtggcacaacctttaattcagcacccagaaggcaaatcaagcctgctctacacagtgagttccaggactgcagggctgtatagtgagaccttacttcaaggggaaaaaaaaaaaaaaagtgagatcaagtggaaggtgactggttcgccggtacttaaagtggtagagttgcttacagtcctcgtccaagtgcattgttgttttgttgttgttgttgttgttttggttttttgtttgtttttgtttttttaaatccctcattctctttggcttcctgctttccaacagatctctcctgcctattcgggttcccatcataatttcagcttccctctccagagtccagcttagttgcccaacgctagactttgagcctcccaaactgcttctaagtaaacctttgatattctctataggaagacaagctaattagttcaagaggcaagggaaggcaggagaggtataacccaccccaatgagaagcagagttgcagaggaatgagacggggtgaggagatggattgaaacgtctgaaggtgccaagggctcaagttcagaccacactgtagtgggtagagcaggggctacatgggaagaccagagtggagcttttctgggatgtaacatgcaaacagcaagcactaagggtaaggtgctttggatgtctctatctcacagcgctgttctaccttcagcagatatgaaatttttttttgtctcccccggccccatgtcattatcttttccctggttttaactctgggctggaaatattcctgatgacagagtcagggttagccaagtgcctgccccactgcagcaagagactacacttcccctgcagatgttgcttacacctgcccccaaccaagcttatcttggccaggtgaggtccacaacttagtttttgatctgggcaaaacaagctgggcccccaacttccaaggctgtggaaacagaaaggtctcaaagctgagctcacatcctaaaggtgtatccagctttctcccctgcccttgaatgattcatctacaggctgaaaatggaggagtaaggtcatgacaccttagcctccctcaaccaagaaagatggtaatccatggataagtccattggtcagtgacttttcctctccactgtctgcccctcaccccacacacttgttccctagggaaagagtctacataatcaacctgcctgggaaaacctctccctcaggttccagtgatccctctgtcccctccccaggcaggcctggcccatcaatggtgaggctagaagaaccccaagtggaagggagatttttcccatggttgtaaacatacttcccctttaagataaacatttttagctctccaatatggagtagaacatctgtttgtctttctgtgcctggcttaattgctctgtatcccatcctctaatcaaataaattcctatcacaagagacacccattttcatggccgacaaataaaagtagagcaagccacgcttcatttatccatccctctgttggcggccacttgggttttgtttcttggccgctgtaaatggtgctgtggtgagcatgagcctgctgatgcctcttcagcagattggctccattctgtttgcacagtcatagctaggttaggacaggaatgtccgctgacataaacgtcaaggatggtgacacctccatctcccaaggggagtaacctgcctggtccacacagagcttggcacacagcagggaggagtgacagtctccactgtcatgagatgcaccatccacacaagccaaagcctgacttgggccatggaactgtggagatttctgagaggagacaccacaaaatccacaactacaggaatcctgcttcacttgcaaaggaacaccgagtcctttctaagctactccgccctgagcatctccacagggtggcagtattgactgaaaagcagaactctgtcactaagaaaggctgaaatggtctcaagccttaaacttcctgctaaaaagcctgggaatcagaacgccaaacatgaatctatagattctgacccgcggtgacacaagtctagggctccagagagcctcggcattgtgatttctttctaaatctccgaattccattttcttattattctgaggtgccccctttggtttgagaatcataggattccagagttcagggctctatctaaccagctgcttgggtcctcggatctcaccactggttctccagtgtgtgctcatcccatccacgacaagggatgtgatgctggctccacaggcaagccggaggctggggtcctgcacccatctctctccatgatgccacacatctgcacagaaggtccaagcaaaggcatctcacaacacttctggaggaaaaaacaaaaaactcacacaaatgcacgaaaccagtaacaaccacaaagtcctacatatattaatttcccctcacatacctgtggtgacattgaatttataaactgggcattctaggagctaaacaaccaagcgcagaatagacagaattctttccttcctctcagctctgaggacagacaactcagttttatgtagcccttgacaagcccagtatactgccagtttttctttctttattacagacctttaccattttaattaaaggaaacagtttctagcttctctaagacatatttgaattccagggtcaccactctttggagctcttgagtaaagagagggtcacttaaatggaggcacagtcgctctcagaacagagacttaaggagagggcagagtccacagtgtgggtatgttgggggtaataacgggatgatgcccattctatatgagacagagtcagatttcaccaccctacacataatggagggacatttaaaattcatgaattgtgtatttctggaatttccctccacagagtttctggacttttggtgactgtggggaactgaaaccacagaaagtaaaactttggataaaggctgagggagggggtgaccataagcattactataagctaagaaaataaggcacgcagatgcgaaggcatcaggatcaagtcatccagagctccgtcaagacgaaccttggttacaggaccttgctgctatctcaaataacaagaaagaatggaaggaaggaagcaggcaaggaaggaagagagggagggaggaaagagggtaagaaataaacaatctgataacagatacagaccaagaaaagtcagcaagacaagatgctgaagcaaggggtgcagttgaggaagcagacatccagacagcgggtgtacacagaaccacaaatggaccagctgctagggctggacctgcccagcacaaggccagacagaaagcaagggtccagtctgaataaagccctgcataggctgggagcaaccacaatgcgtgctgggatgtaatatagactaaacatagaccatacaagcatccttgcacagaaggcaaaatgaggtgactctcagagctggatcatcttgagttggaagccttgcttgcaaaggccctgcaaaggcactccatatcaatgatggccagaggcacagctgtggatgtggtaatgttgttggttctggagaagttgtggggggcggggggtggggggagaaacacagttgtgggatgaaggtgcaagaggaaaagcagtcccagatgagcaggaagctcaccggctatgaagaaaggaacacaccatcaacaggacggaacaatctacacagacagctgtgtctaacagagacaactgctaagtgactaaggaggagggtaggaccaagtaggagaccagaggtcaaggtcaaggaagttcactcttcaaggacagccccaggagcagatgtggctgaatcacttctttccttcctgtcagccccacacaaccacctagggcacagtcccacttgcttacatttgtgttgtctttctcaatagtgtgtgccaaggcatcccagggtgcacctcgccagaaagctccaagtgtggtggagaatgtcccctgctgtctgaggagactgttagatacaagtatgcttcattttagtgcagatggttgtaaaggcctctcacagatcttgtgaggctgggcttggaggctgttcctaccattaaaagcaaagatggtgcacatatctgtctgtagatactggttttggtctgtgggaaactacaggtgttgaagaaattagccaggttcagtggtacatgtcttaaatcctagaattcaggaggcagagataggcagatatcttcaagttagaggccatccagtctacccaacaggttccagaattacataaagacaccctatctcaaaggacaataataaacgaacttaaagtagcatgtgtgactggagaaatgctcatggttaagagcaatggaagtgcttcttgaggattgggctctgttctcagcacttacagggcgcctggaaaccatttgtaattccagttccaggagatctgataccctctggcttccttcagcatccttcatatggtgcacagacatatacacaaacagaatacccatacacataaaataataaaacaagaagccgggcgtggtggtgcatgcctttaattccagcactcgggaggcaaaggcaggcagatttctgagttcaaggccagcctggtctacaaagtgagttccaggacagccagggcgatacagagaaaccctgtctcaaaaagaccaaaataaaaataaataaataaataaataaataaataaataaataaataaataaataaaacaagaaggtgtgggtacagagagagagagatagctcagagattaaaagcactggctgcccttccaaaggacctaggttcaattcccattattgacattgtggctaacaactgtttgtaactccagttccagagaatctgacactctctttctggcttcaacagatactgcatgcacatggtacacatacatatatacacacagacaaaattcccatacacataaaaaaaaagaggttcaaaagatgactcagtggttaagagcacttgctgctcttgcatagggcatgggttctgttctcagcacccacatggtggtttacaaccatgtgtaactccagttccagggaatctgatacccacttctaacctccttgggtaccagacacaaatgtgaaacccatacatacatacattcagggaaacattcatatacataaacaattttaaagtaataaaattaaaaaagcatatgttggctgtgggtgtggctttgtgtcagatggcttgcatgcaaatccctgagtttggtctccagtactacacacacacacacacacacacacacacacacacacatttagtgtgcatgtgagtcagtatgcatgtcattccatctacgtggattttttaaaggtaatttctgaatattgtttggatataatttctttttcttttttctttttttggttttttgagacagggtttctctgtatagccctggctgtcctggaactcactttgtagaccaggatggcctcgaactcagagatccgcctgcctctgcctcccgagtgctgggattaaaggcgtgtgccaccacacccggctctggatctaatttattcatacccaaagccagtaagtatttcttttaacctggatacagagaaaactgcaatttttcagtctttgagctcagagggacccattcctctgtgaaaaggtcctgcgaaggaccccacagggtcagccagagatgttcctggaaggaaagaagcgagcacttgacaagctgcagggtagggatggaaagggctgcctcttctgccatggaatcgcaccctggctgctcactgatcccttatttgggacgaaaatgactttcctccaggaccactcatacatagcgatgccttttctcatcaaaaccacagttccttgagttccagctccaaagtggtttccacagagaaacctcaaacactctcagtcaccacaaaccatttgcaatactggctcagaggccccacccatgtctctgccccatcctagttcagctgtctcagatgtgctgagagaaggcatggggttaaagagccttggtctcacctgtgggcatccaccacatccaccacgtattcaccaggtgcttacccttgtgacaagggtgcagatgctctccccctatagacacggtttggaggcacattgactgacaagggacagcccttaggggacagcagagggcgctcctggaagcaacctgatctccagacaaggaggagtccacgggcaatgcatgtgttcccagtaggagccaaaatgtaggtgtgctgtgcactgcacagtcctccaaagccaggctgcaagttagagggcaagagagaaacaggtgggagagatgacacacaactcctataaaacagaggcggcggcggaggacaagaccaaggccagactgagttaagtagtgagctccaggatgagaaaacgaaggcaggtaggaaggaaggacaggggaaagagaagtggaaagcaaggggacaaggaataaaaacaaaacaaacaaaagcagaaggagggtcaggcggtggtggcgcacgcctctagtcccagcactcaggaggcagaagcaggtggatctctgagtttgaggtcagtctggtctacagagtgaggtcaagttcgaggatagccaggcagggatgcacagggaaaccctgtctcaaaaatcaaaaccaacccaacaaacaaaaacaaaaatggaaggatagaagagagataatccatgaggttccagtgtagtagaaaagccctccgagacaatggtccacactaaatgagacgccatctcccagggtccatgaaggctgctattctgctgcccagggatgagattcagaagagggcaggacctcccatattgtctcggttgtctacaaattcgttgcaagcctggctcagggtccttggtgatccctcaaatgtctcctcccacctgggaaaccaaggtactctggattcccctcctccctgtcctccccattctcctctctgtcctccctgtcctccccctcctcctccctgccctccctctccctctagctggcctagcaggggccaatacaactgcagggaatcaaggaagagccttttcctgaactgtcctggatgccccagtccaacagcaactcccacttgccctggcttggtttgctccactgtcctgaaggcacagtgtgatatcccagacctccagcgagacagcccaacctgcaagccctgatgggaggggtggcctgagacaacagtacctacatgcctcatttgatgggatctgtaaaagttctacggagatcaaggacaagtatccagctgatgggtacttatcagcacccacaaaggagagggcatggcactctcctttgtgtctggagagcctgcagcccctggagctctgctcaccagggccctaatccccctccaccaccactggactgcagcactggggaggtggaggtgctggaagcctgcctgctgggctcaggcccccatcccatccatagcccaggctcccccagtaattcgataattgggtgggattttcactgagagagagggaaagtccaaagtagcgatgagccagctctcctcccctccctgcctcattccagagttcttccctctgagagtagaggtctagcagtgactcagactagggagggcgaacaaaggctacacttagactacacagactcctaatggtggggcataagaaaaaagaatggttctctctctaaacttgggtctcttgataccatctccaggtgactcctggagccagggtctataaacacatgggtggcatcctcaatatcatgagctccctttgctaatggtaaacactgggcaggaggaggcaggctctagggagcagcctgccttgatttcgtcagtctgtcctgagcttacagaaacaactgggcatctctttctctgagaagcaatcctgtacagcccacggcacaccggagaccactttatgctcccactgagccacagggtgaatcatgactcaagaccaccggctttagaagtggacagggcaccacgaacgagcctgaaacttgcgtttgtagctcttacatggtggctctctcttcaatgcaaaatgccacaagaattcctgctgagcttcctttacagcctcgggtactgaggaccaatccctggtgggaggtgtctcttacctgccatgccttcaggtgctccagggagaagctggagcacatccaaacttgtaccttgtcctcaaattacaaaactccctagggtcttttctctgggctacaaaattctgcaaatggactcaggaggaatcaatgtggaaatttcactttgccttcccaatcagcaaaataatgtttgccaaaatcgttagatttctttcccctaagtaggctactgccgacttgaaagcagtggttccagaacccgagcccaggggctgccacttcctatgcatgagtttatggagagagtagagggattgattcttggacttggactccctaacaactacctgcgtacagggtccgattgctccctgctccgggagggggtgtggctacagactgattcctgagagacaagatgatggagcctcaaagttgccaagagcaagagacaggatgtggcagaacagaaaaagtgctagagggagaatgtatgtcttgcgctgatctcatggtgcttggagcttgagatccagggcctggtcctgtgacccccataggttgagatcaggaagaacggagcccaagctcgaggactacgcagtgcaattctcagctggcacagtgcggtcctggaaggctactaaccggtgcacaagagctcgccatgcacacctaggcacatccaacacgctgcgcatcccaacgcgcattgtattccagcacataccagcagtgccgcagcaccccctctacgaacaccgacacaccccgcactctgcacacaccttcagcaccccagcgccaggagctctcccattcaccccgcgcacccacggccgcgggaggggccagcgccgcgaggctccaaacccccagggccccgcccgcccctgcccgccccgccccggccccagccccggcgggcgccccccgcggcgctgccccgcccccgccgccccgcgccgcccagggcctcggcccgccgcccggccgccggcccacctggcgcagcgccgccctcggagcccgtgtaccggtgcacacccgggaaccccgcgcaccccgctgccacagagggcccagcgccactgcagccgcgccacctcccagggccgggccagcccaggcgtccgcgctctcggggtggactccccccgctgcgcgctcaagccggcgatggctcctctcggatacctcttagtgctctgcagcctgaagcaggctctgggcagctacccgatctggtggtgagtgagtctacttgcgttcgccccgggccccagtgccaccctagggcaaccgcccccctggggcagggcccccaccgttgctccgcgcactggctgcgagcgggttgttttccttggctgccacttggacctgtttgggccgcagctgggacgcgggtggcggagtttccggggacactgattcccctggcaggagggaagggagggcagtgaaagtccatgctgtccctggcgtcgaacaagaatggcagaaagcgggtcagcacatgacactaatgcctaggcaatggtcgaggaaggagtgtaaaagagaagcagcgcaaggaagagactcttcttaggtaccttatcttacacacacacacacacacacacacacacacacacacacacacacacacacacacacacacactttaaaacaaagtcggcaagacaagaccgaacagctcggggcagcgcagttacgtaaagacagtccgagaccgggcggggagtggctcagagcctgcggcaaggcgcaccggggccagccgggagccgtgcgcgcttctccaacgctgtcgcctagcttctacgtagctgtcggggtggaagggtcggtcggccgtccacagctttaatctagctgacaagaaacgctgctgccgggagggatgagcagtaggtaaagtaagggatttgagtttcccggagtgagaggcttggggattcggtcttggagaggctggacagcatcctccactccagacaaggcacactagaagactcttctcagcctagggatggagtgagattaagcaaagggaaagttcctgactctcaggccctaagtcctccgcacgcaacccgagagaaggagaaattggggcgtcccttcctcggggtgtgtgacactccctcccttcatggagcgcagacttaaggtcaccatcagtgcgcagatctctcctcgaacacaagctagaggattgagaccggatagggaccggcgcgcgccgctggtggagactcagttggacagaagcctcccacaaacatgcgcacaccccccccccgcccaggaacactccgacagcttgcctggaattataataattatgccgaggggaaggggggacccagcgagccgaagtacatctaatccgataatcatttttctcttcgagatgctttaggagaagagctgagaagcctggggtggggatgcagggcccgctccgctgcagggatggagggtgggctactgggagtcgctaggggctggagaggctgctgggcagcggctgcgctccacagagatctagctgagcctccgctcccttgagatttttaagacccgaaggggcacctgtggagccctgtggcctccgggagtgaggattgcgtcgggcgcgtctaggagcgcggacgcactgaggcgcgtcccggcgtccgcggggagccaggggcagcgcgtccgagggagccccgcgggctgcccgctgctgcgccaggcttctaattagaacccgccgccgcggaattcctgggctcaagaggaagcgccttcgcccccgctctactcccataaagaagggccttgtcgccagcctcctggttaccccgcgtcctgggacttttgtccttaaggtcgtggggggtcactaaccgggtccgcccaggcccacagaagcatagcctccttttcacctgggctgttagacccccccctcgggtgcacccagcattctccaggtgagaggggaggggtgtgaaaaagtgcagcccttagccttcccacccctcccctcaaaggaccggggcaaccctttggccccagaaagtgatacggaagtccacctggtattcatggggttgggtgacaagggccacctctccgcccatcccctacttccactttgttctccgtaggattctcacacttaacaattctgcttcctgagacgcagcccccctcactctgggatgctggcttcctggggacaagacctagttcccctcctgccccctctattccctctcagttcccagcagactcaaaagtgtcagctggatggggctcgccctgcagaatggagaggaagggtcccttaaaactacagtggctgtagtcacttgacacagtgtggtagctggctctttaataaaggttgttttgcaatttctacttaccaaccttcaagtgtctcctcttttctcttccccacactatgggcctagataagccatagcccccaatatggagaaacatcatggcttctgctgggtgggctactggtgagcttcatacagaggcaaaacccgggaccttttcttaagatttattatattcacgctcagcctgcacgctgattcttttacttgacctcccacccagcctgagcctccctcccccctttctggcccccagctcccctttcctatgaaagtgagaaagtgaaccgtagagaagttcctcacctgcaggaccaaaaccgggaaatctcaaatctggagtcattaggcttttgaagatggtgtgggtcttcttggggagaaagttgatgcttccctgcttctggtggaaccgtgaaggtctacctcctcccccggaccaactctgaaggatggttgatgtgttcaaccccattgccagtcctgataccacagaaccatcaaaagtaagacctccatgagtgcctgttctgggaggcaagtggaccaaaccacatcccagaagaaggttctcttccctttcccactccagtgccaggttctcttctcacagggttagaactgattggaaagagcccaagggaagaggagtggttcatgaggctagaagaaagtaggctccatcagaggaactctaagatgcacctgggaccccccctcctccctcccacttccttatgtcctgtctggagatgccagtcttgtggcatctctctgcttctccccagtcactgagctaattcgtggcagggaattgactttattcaaactcacaactccctctatctactccacaggctacactgctgtgtccccaccctcactggccacttcttgcggtcttctcagttctcagccctacactcatcccatgccctcactgccacttggatttcctgtctgtgtccctgcttccctttctcccttcctcctcagggtccctctgatatggacacattcctgttgggccaccagctcctgagcatgggaaacactgcagagcagacagaggcagtcctcctgagcttctaacagtttcctctgtggggttctccctggtatctctgaagctgtgtgctgtgtgtgtcccagggacactttaatgagtcccatttctttagagaccaactctagttcctcttctcagcacatgggtgcctctggcttctcactcttctctgcagccctgatcctcccccctctgggtgcactgctgggcacagacagcctccaaggagttagggctcttagctttcctcccaccttcttgtgacctggtgatggatgccagcagtctgcctcacagtggggacaaagcctggtggaacacacagggtaggagaggaagagaaagagggagagagagactgactagggggcatatgggtataagatggagagattactgatgagatggatggtccgtctgtccatgtagaatctccaggttgccaaggtgaacaggtgggtatgctgctgtacagagcaaatgaagagatgcgagtgcacagctaggcaaagacaggcaaactgaggcagagtcaagctgaatttcctggcttgctacgaagctgcagatatcactccagagctgtcatttatgagacttcctcccagtttagcccttaaaacctgctctctcccctcatcttcaggctccttcctcacctgcccacctctgtccacctgcccacctctgtcagttctctatatttctggtccctccctcctcccctttctcccttcttccagtctctcacatcactcggtcagtaactaacataaaactcacaaagcaaaagaaatcaggaccctacggtaaatcaccactactactagtactgcaactcctggggcattgagctaggtgttgcttcctcagaactgccaatcactcaaactgtcatcattaaccccaagaggaacattcaaagtcagccctttccagagaccaacttacccactcttccacattttgatgctcacacccttcaaatgttatggggcgggggtggggtggggtggggatgtctccaaggctgggtgtctttcttccacccagctttatgtccccttaaaatgactttctatgtcatatatatatgtatatatatatatatatgtgtgtgtgtgtgtgtgtgtatatgtatatatgtgtgtgtatgtatatatatatgtatatgtgtgtgtgtgtgtgtatatatatatatgtatagtgtgtgtgtggtttcccagactcctttgtggccagagagcagagagtgagtcaatagcactgagtatactttaggcaattattaatggcctggtaacaaccctacatatacagacatttggtcccttgtacaaacctttgacctggccaggcagtggtggcacacagcctgcttttaaagccagcatttgtggaggcagaggcagaggcagaggcagaggcagaggcagaggcagaggcagaggcagaggcagaggcagaggcagaggcagaggcagaggcagaggcagaggcagaggcagaggcagaggcagaggcagaggcagaggcagaggcaggcaggcagatctctgagtttgaggccagcctggtctacaaaatgagttccaggtcagccagggctatacacatagaccctatctcaggggggaaaacaaaactaaaactaaaaaaacctttggcctggagggtcagacccttagcaactcaacatcttcttttggtatggttcaggattcaggaaacaggactcagatttgtcaccttggccctgagaatcagaatatgatcagtgctttttgatacatgaccagagcctaactgtaaaagatcagtcaattctctgtgaagaagtgcatctctctctgtgtggtgttggtggtggtggtgggtattgccgcagcttaatgacagtgcaccaacaagtccggttcttctctgcttggtctggtaggcatctgagcctgtgtagcaggctgaaatcactcatcagcagagctctttctctacctataccctagttctcgaatgtgaggactgctggcccagcctttgggatttctgcatttgcctttgttctgggaaggtgaagaattaggctattgggctgagagggttcaggaaggaccatttggatctccaactccctctggagaaggaggctttgtcttttgcttggcctcagaggctgcagccgaggatgtagagaactggcaggaagctgacctaggttcagggcgtgaaaaggcttcctgagggcttgtcctcataccagtcttgctagcaaggactcggtgagtggcagaatccaaggctgagaaagggagctggccacttcccttccattctgaaggctgaaacttccaggagaccgttaacaacacaagagccacatagccctccttagaattcacaaagccctcaactccaccgtgtgcagctggaggaaacttgtctctgtggtgagctgttgatcacatgctgcatttagagagagttctgggactaaagctcagagagaagacacaggcccatggccagagaggccttagctatgtgggccttgccacctgtacccaggagcacaccactccctttggaaagagcacccttctaacacctatcatcaaagtcaagcagacccagtcagtacagcttcctttctctcccctggccttgctcttttgccctttgcagccaaccagtgggttgagttgagtggatgcccgaacagagtctttccagtggacaataggcgctgtactgaagcatggtggacgcggggacatgtttgaatatttctgatactttcccccatcccaccatgtgacaaccttccagctctgagacctagaggaacctggcctctgcctctacctaggtctccctccagggctccccaggtgacaccctcgaggtgtctgatacattagtgcttccacattccttcaccagcagaacgtgccgctgccgcccagagaggctggcaaacacatggccgccggcgcgggagcctcccgcctgccaggactcgttcaaagtatgtgtcagtaatcctgctggcccggcggggcaggacaggcgctggctgggaaggcttcaggcagggccctgtgctgactggagtaaggacttgggacccctccccaactcagaaagtgctggatcctcaaggagggcttccattttctggggatgctgtccattcgtgggaaggcagcggattgttggggatctcaggaacacaggtaccgtggggacagctctccatctgaatggttcctggacagccccattcaaaagaggacagtgtgctttgtccatgaacagagtgagtcccataccctgggtctcaggtatgagtgtggaagcctggtgatgtcactgagaggcccagtgctccagagagaaaggcctgagtgggacccacagcattctggcccaggacccttatcaacagagacttctctactcatgatcctccttgttccctctgggcctgggcagagccttaggaaccctacctgctaggatccaactcagtgcttactgtgcctgattccatgccagcagcggataagagaagtcaggcaagcaaggcacttcctgcaccagatatagatgcagggagaggtggacagacacagtcccagacaggcaggtagcgctcgcacacacacacaacacacacacacacacacacacacacacacacacacacacacacacacacacaaacgtgagagcacatgcacgcagaggctctgtccataggatgtgactctctaaagtcagaaaagcaatggagacttatatgtcccactcctatcttgaagcctcagttagaataaagcctaccacctcattgggtaaatagggaaactaaagcccaggacaccaggaaagggtgtcacagtactcaagtgaataacagtactgtagcctggcctcctcacctatgtctgtccaaatgcaacccacttcagcaccaagttacttcttcacacagcccctgtccgcctgactacaagcttccaccataaataacagtgggtcccctgcttgctcctggaggctcgacagtagctcacatggaactggtgccatgacacaaggatgggaaaatctacttgcgaccaaatagaagctggggagccttggcccagggaggccagtgctggcccaggctgggctggcctgctgcccatctcccagtcctggaccagcctccttcctctactgcatgtcacagccagcgtctctgctatatccctggccaggtgcccggcctttcaacaggagcaagggaaggaggagggagaaaaaccattagtgtttgccggctgcaggcgtggctcacgtggctgcagccacaggatgaaactcctagtctaaggatggggctatgttccaaaacatagcgagctctaagtagacggcgatgcctacccctttaaagacaaactaggaacaagtaataaaaaattaacagcattagtgaaaatgaaagcaagaggagtctgagatctgattggcataacacgggcattttcactggtgtggcttgttcttgtttgacacacacacacacacaccacacacacaacgcgccgcgcgcgcgcatgcatgcttttgtaaggataaaaagtttcagcctcactttctaaggcatagtttaaacatctgcattttgggatcattttgagggcggcctcagcagttacctgaggtctgaagtgcttagggtccactgcctaactttggctgccagtccttctgctaggacccaagaaaaggcttggggtggggtggggtggctggacctttcagagaaggaatggcaggagaacactaattttatttggtgggggtttgtccagaggaccttacaatgtgatgtcaagttggacagttaaaattctagccgaaagtaagattgtaggcttctcccaagaggctgtcctccaccctggttggcagagagaggggaaatggaatgaattcctcccaccgtgaatcacaaaggccaggtgcagagaaatgggtgcagcgagggtgtgcctcctcccagcttctccccaggcccaggcagggccctcctgccctagctgtttccatcaccccaaggcagggttcagaccttacggtgacctcacaactggaggagctggatgtggattggaagtgactggttacagggtctcccattcttaatgctcttcctgggcaaaagataagggctcagcctaagtcaggacacggggtcctttgagtaacctgagggttctctgtctttgtctgcacatgggtttacacacgttagagggatcctgtgtgaaaggggagggaagagttcatacaacactcctggaggctcagggcgggcccaggggctcaggaaagactaggtgcgttttggatgggatgaagacccccgtttgtctggctggtagctgtctcttgggccttgtaagcaggcaagggcgactggctaactgccagggctcaggtcccactggtccctgtcccttctccaacccctgatatctcttgggggttggatctgataagtattggcctttaagagagagcaatggctcaagaggccagtggaatttcagatgtctaggggaaattatgtctatcattaagttctgggagaatcaggtggagaaagcagaaaaggcaggtggcaaaggccaggtcagggcccaggaaggcactcaggtgtttcgagtttggactcaagccttagcaaaatgcttgtctttggagtatctttacagttatggaatgtcaggctagaagagacctcagatcagcagcttaaaactgtgtttctgtcactatgctccaaccctacggttggtcacctacggttcagctagggacactgaggctccaagagtctcagagggcagaccagaatagaccagcacagtgatgagatgatgagatgagtcctcacagttaagatcattgctctcatctcccttggtgactctcccttgatggaagtggtcctgtaagtgaagcctgcctcttttgtaacactgtctcattttgatgtgctagctgcacagttcggcttgatgcatttctctgtattggactcattcatgaatgttactttgcttaatacattttaagactattacagtgtatcagggccaagaggatggctcagtcagtagattatgtatctgttacacaagcacaaagacctgtgtttgatccttaggacacacataaaaaaattatctggtagtatagttttgaaataccagtgttgaggatggaaagacaggcaggcccccgaagttcactgaccagccagcctagcctaaaataagctataggttccaatgaaagaccctataacaagacatagttcctaaggaacaacatacaggattgatccctgcccatctagtgcatgtgttcacacctgaacaggaatgcgtgagggggtgcccttgggagccagtgtgccttggggaccattgtttttgccatatcaacctgaagtcttgatataggctccactcaccaagccttggtttcttgtcccaggtggtcttgggtcgcacctgtcctagtttgtcacatacagggtctgtgaacatatcactcgtgagctccacccagggcaactggagctgagggtgggcagatatgggaatgggacaatgatgagagatctgaagggacacacacagcaagagatgatctgtggaaaggtcctgagtagcatcaggaaggggcagctgtccacaggctaagccaacaagcttgtggcatgtcgttgtgtcatgtgcccctggagcttggacacaaggtgcctaaaaggtggcatctcccagagatgcctttttgttctgggtgttgggactcaggtaggggtagaagaatccagtgcagtgagaagaacagtgctgtgccccttggttcttgtcagagcagagcagatgccccagatttaagaacttttgcagctcaaggtgtcagccagaccaggaagccacttctaacctcactcgcattgttggggctcattttgtgtttttgtaggactgagttctccaggactgggtggctgtggcttagggtagcccctgagagtccctctgtggtctcagagccagaaactcggaggcaaactccatgctttggatccaacttctgaaagcacacgagtagcataaacttagaactcagtgtatgccccaaagtcctgacattctgggcatagttttggacctcagaactctgggaatacctcagaatttgaggtgctgctagattctgggcttggagaggcttctggggataggggatggagtcaggcagctgtgtgtgctagagagcagctgtactcagcctaagctgtagaaacctggtgggcatagggaccgctgaatcatactcctgtgcagtgtctcagtgctaatcccgtgcccatgctcccaatgggacaagaaataacattctcacccccagctctgctcattgccatgggacctcaccctggatcgcaaaaggagatgacacgctgctgttacagccacatcactgagggaagacagctatcatcatagtgggtgagaactggagaagaaggttacagatgctgttgctgtttagcgcagcctgtagaagtctagcacacacaatagcaggacctcccccccgccccctaaaaaattccaccttgctcgccttcctatagctcagctgatttggttcctcatagctgtgctgtctccactttccttctgggctgttttgtttagtttttcattttaaatatattttatttatttattgtatgtgttcatttgcacttgtgcacaggccacagcatgcttggggtggggggtcggaggacaacttcaggaatctgttctctccatccacagtgtagattctagggaatcaatgatgtttgtcaggcttggcaataggcacctttagtcactgaaatctctctcccaccctggaatgtgtcttgatgactgtacaaagggctcctggcactcaccttggagacagtgtcccctcattctgatgttaagaaagagtaaaccagtacatacttgtggtccccggtgagggaggttgagtctaaagaatcatgagtttgaggctagtctgagctacctagcccgggctagcctgagctaggctgagcttgttgcttagtagtagttgcctggctggggcaagtctcattagtggagaaggaggaggagggagagagccaggaaatggtaagttagccagaagtttaggagaacacttgagaaagtcctggggagggtcagaaattcattggctacatgaagaattagagactgagatatatgggactctgtctcaaaaacagaaaaataaataaatgaataaatgtttgactttgtacagctttccttctgtattctgtaggcacaggcttagccagctgaaaattgaacatgtttggaaaaactgggcatggtagcacatgccttcaattccagcactctggaggaggcagaggcaggtggatctctgtgagtttgaggctagcctggtctagagagtgagttccagggtagagtttagttagtagaatgcttgcctcgcacacactcgggaagtagagacagggggaggaggattttaaggtcatctttagcaacttagcaaactggaagttagtctgcactacatgagagacagacaggcaggcagacagacagacagaactaaacaaactaatacaaacctaagctgaccatcacagcccagctgaagtccagaagtttatcgaacctcctcaaccctgcctgcccgtctccatcgtatgacagccaccctgttcagtcttcagcattccttcccacaaggcctctgtgcctgggctttcctgatggtccagctctcagggaacaagaaatgatccaggctgcgattcaaggcacttcagaggctcttgggtccagagaatgttctcttccacctttctaagtccatgagagagagcaggagggatcctgctggtgctgcccacaccctggcctcctagctaggggaggtggcgagcagggacctgcccagaggaagggaagcagagaaggctgactcagcatctccagaggaagggggctggggcgctgccatggacctgggaagtcccttctctgccttccttgggggccactcccagcaaggtgggtggggagctgaggtctgaccactccatgccattggaaggagccccctcttcagcagcatcctcttcttccgaacccacatcatcagcacccaggatgagtgctggtttctggcatctaacaaaggagaccacctactcttgggaactggccactggcctaggcagttcctcctgggaagacagaaatggccaggttctggccaggttctctttttctgctatttgagaatgctttccattgtctctaagtctcctagttaactgcattcacagagtgaagattgtcttctttttggatggatagacagatgcccttaccctctttctgggagctttgaatgtggctcagtgggtagaatgaatgcctagcatctgtgaagtcctatgtttgatccctggcactgcagaggcagatggatctctgtgaatttgaggccagcctgatctacatagtgagctccaaaacagccagggctatgtagagaaaacttgtttccaaaaaaccacaagaggctgggcgatggtggcacacacctttaatcccagcacttgggaggcagaggcaggcggatttctgagttcgaggccagtctggtctacaaagtgagttccaggacagctagggctacacagagaaactctgtctcaaaaaacgaaaacaaacaaacaaacaaaaatagaggaggaagaggaggaggagaaggaagacgaggaggaaaggagtaaggtagggggagggggggacattgcccaggccaaaggaaaatcttgctttgtcacaggtaggagagtcttggtgagtgtgggtgcagtgggcagtggggttcatgggtgctgaaagaaggagagctgaagtccttctggatgtgggtaacaggcagagaacagatgagcctgatgggacatgatgggacctctggttttagggtgaccagccaaaagtgacaaggtacagcagtggctttccaccttgatctagtttcttcctctctactcagagcacctagccaggcccctcctctctgctgtccttgagggcaaggagcatagtccactccatatggacgtgtctcagccctcaagccaggaccttggacagtgatttcttcatttcccaccaagtgtctgctctccccatactcagaagtgcctctgtggcccatctagtgccatcagggacacacagacagccatggtggtctgtacctagagaagaaagtgctgattccgcctgcaggcagggaggagggcatctctgagccagactaaccatggaggtcaggggcctggagaggagagacagctgctgagagtggaagcaatccccagcctacacagggctggacttcttatgaacgtggggcaaagagaggaaggataaaggagcaaagagcaggctctgtcatggtgtgcacagggatgcacgctgcacctaggccaggcatgtgatgatgtgtgacgcaggtctctggagtatttcaggagataagagaggccagctctatgggaagtagaccacaaggatggatgtgctggggacagccaaatctctgcatgtgagggttctacagtcacagacttagctccagaaaagtcctaagtgtttggaaaagccgtgtacagcaacacagacctgtaatcccaggatgctgagactacacagtgagaaccaggtcagccagtggtacataacaagaccttgtctcaaagaaaggaaagaggagagatgggtgttggaagccaggcccaggggctcgtgcctgtaactccagccagaggatcagaagatcaaggtcggcactggctacacagcaagtttgaagctagtctaggctacatgagaccctgtctcaaaaataagaaaaacaagggctggagagatgactcagcagttaaagatcgctaactgctcttccagaggtcctgagttcagttcccaacaaccacatggtggctcacaaccatctgtaatgggatctgatgccgtcttctggtgtgtctgaagagagcaatggtgtactcatgtacataaaacaaataagtaaatctctttaaaaaaaaataagaaaaacatgaaaatgaacatggtggggggagagggagagagaaacactatttgggaaggttgctgcatgtgtactgaccgactgaccgtgtgtgggcttccggtgctggctttccctgcagtgtagtgtgacagtctgtggccttagaatccttgtcatctaggtttggcatggacagaaaggtgtgtggactatgtgcaaataccatgctacttaatacaaaagatccaaatgtctgctgtgagcgtgtgggtacgtgtgtgtgtgtgtaggccaaaagttgatgttggatgtcttccgtcactccccactttgattttcggtacagggtctgtcactgaacccagaactcccctggctgcctttgctccccacctcagtgctatggctgcagacatttgccaacctggtttttacatgggtgctaaggattgtatctcaggtcctcacactcacctggcaggcatttgaccaacaccttcctccccatcccctcctcacatgtttttttagaggacatttgcttctccccctcccccacgcctgagttggctagtgccccactccactgagacacctcagcagccatcaacatgctgtctctaggtgcccttcctgtcggaagcagctccgggccgatcacatgcacatagcccagagtctgtccgtttcaagagatggtctcaatcacctccttgtctttctaccaggtccttggctgtgggaccccagtactcctctctgagcactcagcccattctctgtgccagcatcccaggcctggtaccgaagcagctgcgcttctgcaggaactacgtggagatcatgcccagcgtggctgagggtgtcaaagcgggcatccaggagtgccagcaccagttccgaggccggcgttggaactgcaccaccgtcagcaacagcctggccatctttggccctgttctggacaaaggtaccctgggtggttagggtcatctctatatggacatcataaggccttccaaactctacctggctgggcttgctcctcccgaccaatggagggccttggagaagaaagggggaggggaagggaaccgtaagcccaccaggcgggcgggagaggcttggagtatgttggggaggtggttcaccagccagcacccctgggctggtttggaaaggagagaccggcaggagagctaggtgttagttagctgctggcaaagagcaaattatcctaaagtgtagtggttaaggcagtaattaccatgtgttgacctcctgctgcctcctgctgccgggggtcaggggctgggttggctctgcttcccatccacagggaggtccatgggaggctgtctcagcaccagttgctagagagggctctgaagtggggcaaaggcttctttctgtggtctctgagacccaggtctgagacagaaagggagacagagatagaggaggcagaatcagagaggcagagaaatagaagagagacaaagatgacagagactggggggggggaggggagagaggggggccgaaggagagagaacacacaccaaatgaaagctttcatgccttgaacaagaagggaaaatcatataatttaaatcactttagaacatacaatctcagcacacttagcacacccacagaattgcgacactaccactcctaattccaaaatattttcatcctctcgaaaggaaatcccaaacccattatgcagtgcccctggcaaccactggtttgcttcctacccctgtggttttcttattctggacatttcctctctgtgtaattatgcactctgtggccctttgtagctggctcctttcactgagtgtgaggtttacaaagttcatctatgttgccacacatatcaatgcttcattccttttgatgactgaatactattccatttcagtgtgtgtgtgtgtgtgtgcacgtactcgtgtgcaccttaaattttacatgtcaaaaaaagaattttatatgtaaaagatgatgccatctgtggatttcatttcttttattggtatatgtttattgtattgggttttatgtatatcttcatacacatatagaatgtattttgacctgacttaattctgctgcccaggacatcagtcccctgtgggaccaaagtggagagagtgggtcaaaactctaagcagtggatgtccgtgtttcctgagtcacccagcctttgtgtttgctgcagaggtcaaaatacagcacctgtggctttgcaagcctggctaggaagcatggacactgaactgtccccaaggagaacagcattgtggagaagaggctggggctgggttcctgcagtggtcttcctgtgaccctgaaggtgtttaaattctttcttctggtgaggtcaaagcagatgacctcatgagcctttggggtggaagtaactctgttccctgcagtctgaccctcccctgactttcacttccagcagtccactgtcggcatggctccacccagtcccatcagcctccattcacaagccagctcttcacttcatataatgacatcatgccaccagtcctgaccctatggttcctctgaccccctttcacctaacgtcatgacccaccattgattgtccttcctggtggcattcaccagctcacttccaggggtgttagcgtccctatctataaaatgggaaagtaattgcagcttgcaacttgagagctgtgagtcgggctaattacacagttgctccccacagaacagcactgctgtatacaggggaggatcaagtccctaggccggtacagtttaccaagcatgccttatattatgtgcacgggtggtccatcctgtgtcttcatgggaatgtgatgtgtgtacgtgcagcagtaaaaatgctagtgtgtacacatgttttcctacatgaccacatatgagcagcacacgtgtattctgttgctttttgtttttgtttttgtctatttgtgttttgttgctattacaatgtacctgatactaataatttgaagagggaagatcgattttggctcttggtttccgagggttcagcccatggttagaagacttcactgccttaggcaaggcagtcacaaggtaactggaatgtgttaccaaaggtttcttccttcactggaaccagaaagcacagaaagcaacaggaaggagccagaggtgaatacctttctaggacataccccaagcacgcttctaccttcttcccccatgagctccctgtctcttaatgataccacgatatcctcactctgtcaagtctgctcattagttccaagctcaggttccaatcacctcaacagtccttcccagacaacactccatttcaaaacatagcagcacgtgtggttatggtatgtacatacgtgtgcacacatggcttcagagtggggctgcactcacatgtgaatctgtgtgcacaggtgtgggaggagctgagagttctacatcttcatctgaaggctgtcagcagaatactcacttccaggcagctaggacaagggtcttaaatccacgcccacagtgacacacctactccaacaaggccggccatgccttctaatagtgtcactgcccaggccaagcatattcaaaccacgacagttgaggagcctttagagatcctgagaagctggcctttgaaggtttctgcctgaagtctgtgctgcagtgaacaagcctgactcccattaccacagacagagcccctccaacctcctgcttctctgtgattgactgaaatgagccaaacattacttctgttgggtattttatcacagcaattataactaatacatccacctccatgggggagtctgtgggagcatgcacacacaccacctccctcacaatgctaaagtgagtctctcacaggagcaaggagggcaccccatgattcgccaactatgtttagagctgaggaaggggcaggcttttatatcctgtcatgctaacagagcgggtagcgctcagtttctcctcttcaccagcactcggtattgttattttcttgcagctgtcttcatgggcgtgagcattttttcttgaatttatcagttatgtgtgccctttataaaaaaatctatctattcagttcttctattcatgttttaataaggttatttctatttagtttgagttttgattatttgtgttttccttaatcatagttttagtttctctctctctctctctctctctctctctctctctgtgtgtgtgtgtgtatgtgaatgcttatgtctgccttggtgaatatgtgaaagtcagacagtccgaatctggttctcttcctaacctgtggatcccagggattgaactcagatcgaattgggttcactttccagccccgatgtggcagttcacaaccttcaataactccagccttaggcactctcacactctcttcaagcctccacaacatggagacaaaacatgcagacatttaaagtatttttttatttttacttttaaaaaatgtaaaaattcttttagtgtatagcctgtgtatggtttagtgtacctgtgtgaaggtgcccttggaggccaaacagggtccagaccctcctgagctggagttactggcagttgtagctgtccagtatgggtgctgggaactggacttggtcctctgcgagagcagcccatctatcaactgctgactggtctctctagcctcctacaggagtctttaactttgatgacaagtccccaactctctctttggctttttagcgctaagaaaatctggctgaacccaaggtcacagatgtttgctcctccctgagccccccacgcccgagacagggtttttctgtgtagctctgtctgtcctagaactcactttgtagaccaggctggcgtcgaactcacaaagatccacctgcctctgcccctcgagtgatgggattaaagcggtgcaccaccatatcagctacagaaagcctgctttttctgtttcctcgaaagagtcttatagcttcaagccagaagtgatggcatgtggctctattcctactcagcagtcagaaacctgagctctatacatttgagaacaacctggtctatatcctggtctgtatggtgacttccagaccagtcagggctcagctcacagtgcttttacatcaaaaaaaaaaaaaaagaaaagtcctatagcttttaatctgacattaggtctatgattttgttttaatattttgattaaatttatattttgtgtgtatgggtgtttgcatacatgtatgtttatgtaccacatgcctggtgctcacagaggttagaagatcccctgggactggagttatatacagttgttgccatgtggctgctgaaaattgaacccaggtgctctgggagatcagccagtgtttttaacccctgaaccatctctccagccctgcttgatatatatatatatattatgttatttttatttgtggtatgagaatgggatccaacttcatctttttttcttttttaactttggcttgtttgtttcttttttcaaaataaagtttctttgtgaagacccggtcgtcctggaactcaccatgtagaccaggctggactccaacttaaaagagatccatctgcctctgccacgtgctggaatttaaagtttgtaccaccaccacccacctccaacttcattctttttttattttcatttttatttttatttttttagtatagaatagagtttatttagggcatggggaggggagctaagagagtagtagaggcagagaaaggcggagagagtagagaagtggaagccagccatgaccacgtggagagaggggggaggggggagggagagaggggggacaaggggacaaggggcaagagcataagcaagcaaagctccaacttcattctttactgtgttgaaatgcagttattcaaacagcgtttgttataaagagtattgttccttcttgaatggccttagctcactcattgaaaatcacctggctttgtatgtttgcattgatgaacatataggctgtttgctccattccactggtcactgagtattatcatagcagtgtcatgcagttttcctgtctatagctttgtcctgtgttttttttttaaactcaaagttgctttggtatctgaggccgtttatgtatgttatcatatgtatgttaggatccactggtaatgtccatttttttagacttattatttttagtgtgtacaagtattttgcctacatgtgtgtatgtgtaccatgtgtgttcttggtgctcacagagatcaaaagagaacattggatctgctggaactagagttatagatagtggtgagctgccatgtggtactggaaactgaacccaggtcctctggaaaagcagccagtgctctcgattcctaaaccatctcttcagctcccacttggataaaaacttggagatcttagggactgtgtgggagaaggaggggggggagaaggagaagggaaaggaggagggagaggaggaagaagaggaggaagaagaggaggaggaagatgaggaggaagggaaagaggaggaagagaaagaaaaggaggaggaagaggaggaagaggagggagaggagaaaggggaaaggagaaggaggaagaggaagaggaggaagaagagaggagaaggaggaagaggaagaggaggaagaggagaggagaaggaggaagaggaagaggaggaagaggagaaagaggataggagaaggaggaagaggaggagaaggaggaggggaggaggaggagggataccatcaagctagcagtattgtctcctgatccatgaacgtaggctatcttcacagccctaccgcatcagtgacgcttggcggctcccatctctgagtcttgtacattgttttctaaattgttcccgagcatttcttccattgttatctaccgtgacattcttttctttttaaaaattaattaattttatgtccctgagtgcttttgggcaccactgtcatgcctagtgccaaggagatcagaagaaggtgtcggttttcccggaactggagttacagatagttgtgaactgccacgtgggtgctgggaactgaacctgggtcctctccaggagcaactagtctctctcctgggataaccatctcttagccccatcttgcttttcttactctgtagaccaggctaacttctaactcacagagatcacctgcctctgtcatccaagtgctgggattaaaggagcacacaaggcttcctgctcatcattgttttatttccgttttgtattgtgtttggattgtttgttggtaagaggcagagatctgttgagctcaatgaggtgcagtacaattgaccagctgctccgtgacctggctgaagctgttgataggctccaacaggttgtttgttgtctactattggttccttgggctgctctacgcatagggtgatctcacctcttcctcccatgctggatgctctttattcctttacttgatatccagggtgagagcatccatattttcccaaccttgaagtgactgctttctgccttccccatagacagtgatagctgtgggtccatccaggttttaattttgtagattcagaagtaagaaccctttactcgtgtataagtagataaaggattttttaaaaaaatattttatttatttttattttgtgcatatgggtgttttgcctatatatacacctatgtgccacattcatgcagtgttcacagtgtccagaagagggcgttgagtccctggagctagcgttaaagatggttgtgagacaccatgtgggtgctgggaatagaacctggggcctctggaagagaggccagtgctctttaatggctgagacatcgctctagcccttaaagttagcagtgttttaaattttatttgttttacacacacacactcatgcactcacacatgtgcgcacacacatgattgtgtgcacatgtgtgaacatgtatgcaagtgtctatggagaccagaaaggatcattggatcctctggaactggagttacagatggtcatgaagagccatttgggtgttggatcttctacaagagaaatacacactcttactggctaagctatctttctagccctgagagtttgttttcaataatccattcttttgatcttttggaattataccaacattttaatggcaatctattatcaaaaggtttatagatggggcatagtggtatacatctttaatcccagtacttggaagtcagaaatagatggatctttgtgagttcgaggccagtctggtctacatagccatgtctccaaaataaaacaagttctccaaattcatgagcacacaactcaacttcattttatttatttgtttccttgcttagagatagcatcttactatgttgtcttggttcttattgaatgccccagttcaatgaatcctactgcctcaaccctctgagtagctgaggctacaggcatgggccacccattcattttcctttcttaagttccacggcaaacataactggaggtgagcagaatttcacaaggtgctgtaactagcggcaagcacctctttcttgatttctaggacaaattctctggggctaagcacattctagaaagatcgagaaatcgtccagaaccagagctgggacacgagaggctctccagtggatatgtatatgatggcaagcgctccatcccacgctgcagatgcacacaacctatgtgctttcagtcagcactctgctgggcagccccggtgctctagcctatgcattttgctctgtgaatgtgtcagatgactgaaagacaaggggctggtgcctgggaatatcttggaaggcttccttggggaagcggctccaaactctttgggcagacagtagtatggttgtggggagcccaggggtgagagaaaaaggagcaggggaaggcagtggggctcagcagtctgactaaactggagcctgaggcaccgtggaggaagagagaggatggctgtgcctgaggctagagccccgtcacataattttgggcgaggttaggggagctgcagaatgttgagggtctcccagtatgctcttgggcaaacacaggctgtctagggacaagcagctgccacaggtcctgccctagagagcagatagtcacatcagccttggggctgagggccgcgcctgcccacattcctctgcctacacccttgcctcctagaagccacctgcaggacagagagaacctaggctgtctggcctcagcatcccatcccgctttcccatggcagcactggaggatttcctgccagacggcagcctgcacccctgcaactgtcctccctgcaaacatgacttaggcctctctcagtttgctgctcccttcttcactctgtcccctccggtccccaaaagccccatcctcctcctcctgcttatgctcccctcctcagtccttgttctccttctcttctggtggccaggggagaaaggagccctccgtgtgcccccagaaaggctggctccagaagtccttgtgccccccaccccctgctgcctgctggcctcgaagtaatcaatctgattggattagggtcagggcaaccctaatcatgtcaaaggttaccctaggctttgtggcaaggaccacaggggtgcctggccacccctgccgaggtggcctctgttgaacagagtttaacatctaccagccagctgggaggaagggagccagcctcttgcgtgcatgtgtgcatgtatgtgagcttgtgcagccatgtgttatagaaaagcgtgtgttttatatatgcatgtgcgcatgaatgtcttacgtgggcctgcgcacttgtgaatatgaatgtgtttgtgcccatgttagtgaatatgtctgtccgaatgtgtgtcatgcatgggcatatttcagtgtgcatttgtgtggatgtgccttacgtgggtatgtgtgtaagtatatgactgcatgtgctgtgtatggatatgtggagatgtgtgcacgtgtcagtgcacatatacatttgtgcacctgtgtatgtactcacaggtattgattatatatgtatagatgtgtgaatggtagctacacacaaatgctcgtacatgtgtgctcaggtgtctgtctctgtgtgggtgtgaccatgtacacggtacaggcgtgtgtgcatatgtatatgcattgagcatgcatgtgtgaatgggtgcctgtgtgtatacaaggcaagtgtttgctcatatctaatcccaaaaccatctgccctgtgtcagcctaaaactcaggatgctaacctgagcgtgaggaagctctagcccttgaatgcagaacgaggtcctagagggctctgctcttgcacccaaaagtagcagggagcgacctacctacctactcgggatcagaaagcatttgaagaattttgagtacaggatgattgtgaaccgtttatatcccttgaggcaagcctcagacacttggaggcaggtactaggtgactcccctgtattgacctctggcaagatgaaatgggtggggtggttgcagggccagcctgggccagaggtaggggtcacaggacgaaggtcaataaaacagctggtcaggctggaaggggacaagtgggaggctcacaggattggggggtgggggcagagtccaggaagcaggttattaaacactatgtgtccttgtgaggggacagctttcttttggctgtgtgtgacatttgcatgtaagacataaaggcacatggtctgaagcccacagccgtggaaactagggtctctacctgcctgtgtacgggggtggctgtgcctggagtcctcagaagctcctagctggcttccctatgagggaggagcatcttctacccaccttgcaacactccaccccacttgggggtggtctccccaagtccctaaggactcctgggggctcactgcttgtacaggcaacctttattcactgcgaagtcttcatttgggccttgctggcctggacagtgtctccagccagagcatcttacctcgtgttgggtgtggtcccttcctccagcctgtgacatacctccaggccagccataccctcaacccatagtggctggactttgttgggtcccccaaacctctgccacaactattagcagagttggttgcttttgaacatcagactctcagtatctgctgaactcaccccaagccctacttggcttctgggcagggaacaacagcttggcctcttcccctcccccaggcaaaaccccttcctgatgactggcctcagcttcgtggctcctcagggggtggtcctccacctctctgtgtgctcagcctatggaaggatcgactccaatgagactagcctgcaagacagccggagcttaggggttccggagggacagaaagggcagctttttagggaagcagagtccccaaatccaggttgcgacccctgacccccccatccgaaagtgttaccatttacgatgcgttgggggtgggggggctcccctggctccgggggcctctccggtatatcattaactctccgctgtgggaggggggaccccggccgatatcccactgcgctcggctctgagcacaatgtccctgcgaggacgacaagattaagcacaagggaaaagtgaaaatgctgttggcgattcacacgcccttcggggtgttgaattaaagcgtctgaaagaggatttcccctcgcgcccgacggcgcggcgggcagcgcatacttccaggttgctatgactggccggcgatcgcctaatcaccggccagggggaaattcatataaaatatcgctggccattgtggggctaacgcggcgtgacagtgtcgcacaaagccggattcatcagccccagcaggtcagccaggcgcccggccgcgcgggcccgggcggtgtcaggggccgcggccacggtggggcaccggcgcattccgctctcaggtggctccggggccttttgtgcctccgtgtgattaccaaatgccaccgcgacaccccctccgggccgcccggctcctcgaggccaggaaaagggcctggggaaggagggacggtgggcagccttggaggggaggcgccagggcggggcctgggctgcaagctaccagctggggctgctcggttctctcgtctgccctctgcctgctgtgctgaacacgggtgggggaagggatgcccacccactgaatgtgttatggaagcactttcagacatcgggatgggaatgggatagatagatggtttgtctttcctcagcgtgacaggagagtgacactcccaagggaggtgatgccccatgacctgcaggctctggccagtctgagcaattatggctatgccatagttgggccttcttcccaccagtggtcggatagtgatctcccagttggagtctggaaattgagaggacagagaccatctggaggttgttgcctgacaaactcagcccaggctgccaaccctaagccttctgtggtctccaggagggtgtggtggatgtaatgtgcagacataggtaagggtgaaccttctgtctgctgggattccctggttctagtcctgtgcagggaagcttcaacagagatagagggtcctaaataaacgcatacatagcatatgatcctaaaggttcatgcaccaaactttggtgcacccaatttcaaaaataaataaataaataaataaataaaaatataaaaataaaaataaaaataaaaaggtactactggatttaaaggcacagattaacctcaactcattaatagtaggcaatttcaataagcccacacacacatgcacacacggacacgcacacagctcgtacctggttctggagagtagacaccttccatatgattcatttcacttctagttctgagcctagtgcctagctcattatggactctcatattctggataggtgatggacggatggacagatgaatggatgagtgggtggatggatgataaatgggtagtagatggataatgagtgcgtgatagatggacagtagacagataattgagtgggtggtattttggtggaggatgggcgtatgataaataatgaactagatgaagggaaaggaaggaagcccagatagtgatactttccttaaacccagtaagagcgcagcaaagctgagattgtttctgcagggggactttgctccccacctcccaggatctgggtgaagagacagtggcctcaattcataatcctcccacgtcagccttcctggtgctggaattacaggcctgagccatgacaccgtttttggaatttgcttcttttatagaacaacttcttcaggtagtttcttttctttatctttacctgtatctgataaatagacagtatctccagccctccaaaagctcttcttagctctgcccccagatgactggcccagatgggcaacactagtctgtaagagtcctgtgctcaggcacccaccccctcctcatttgatgatcaatagccatttgaagggtctgatgtcatgcacttgttttctggagggaggtgtgctcttggaagccctcacctttatgctggccatttctgctgagtcaacagaaactgaaaggtgctgtgtgtgccaggaactttgctgtggtgtgccccattcccattcactctctgcaaaagagatagctctgggagagtgcttcatagctctggtagagtggttcattcaccatggttgtcctaaaaccctatgggactctgatggaagcaaagggtttcctctctgagaaaatgtgtttgttcccaagatccacgttttgcctctgactcctgggtagacccaatcttgttggattaaaatccctgccatcctaggatgtcacctaaacattctggagcctttcctttctaggtctcctgcagacatgttctcagttattattaagtatcttaagtatagcgaagcattgcaggaatggtgtggaatctcaggtccctgtcttcctctccacacacacagccttgcacactgctgtggtacatggtaattgatcatgaaagccaacctgacttggataacccaggtctttgtgcctccatgtcccttgagttccaccatccttcccttttgtactgcccaaatcatcaccatttataggaaggaccttaatctggctttagcagctgcctccaattcatttaagtagagactatacatttttagcaagaaaacattgaaaacgatacaatctttcctaggaggtagatggtatctattcactgctaggaatgtgaactccactccttgcatagtgtgtgatggtgatatcttgggaggtggggttggggtggggaactgcttaagacttttggctgcagcttgcctccatccttcttttccaagcatgttccatttcacattcacctagccaaatgtgggtttgcagcccacagttcctcccctggcttctcagatggagtttctggactacttggactttcttacttctggcctttatttcttccccagcctgttgaaagccagctccagaacttgccctgccttgacttgatcgggagcccccacctcctcatttgacagtagaggaaactgaggttcaacagaaagggaggacttcccagcctgctggtgacagagctgagcaagaatgaactcttgcctacttcaagttctatgttgttctctccttctcccaaggacccttcccctcgagtgtgcctaccagctccaggctgtttgcgtgtgtcttgataagcagggagcctgaaggccttgttctgggcagggcaaggcctagagtgctgggcccccttatcttttggagccaagaaggatgggggaggagcgtttgggtgacacttgagctggataaggtaaccaaggctgccttgagacttggaatgtgagggtgtaggcagagaagtagacttctgagtcgcacccaagagaaggtagctcaaggcctctggccccagactcaggttctatgcagaaagaaagaagactggagtcttaggggcacgaggaggagtgccttggctccttcaaagatcaaataggggttagagatgtagctcagttggaagaatctttgcctggcatggacaaaatccccaggtttcatttccaacactacgcaaagctaggcgtggtagcacacagctgtaatgttaacacctggtggagttcaaggtccttctaggctacacagtaagctccaggcaagcttgggctgaagtccctgccaaaaagaaaacaagaaagaaaaaagaaaaatgacggctcgaaggggtagcctgtgctctggaatggaaataaacagtgaacaagatgcagatcccacccgtggggaggatctggactggaagtggattccagaagacaagtcttcccgaggaataggcacagctgacatgttgggtagatagtgcccaggaccttggctgccatgctacagagtgaagctggtaacactgaggctggggtagagcttgagcccagggaagaatgaaggctgagtgtgaccagaggccagtgagtgctgagaagaggaggaagacaaggctggcggcaggaaacctttagagaactttaggaaggctgtgtatcacactggctctgggcacggagctgggcctgcagtgggtggctgtgtgcttggccagtggaggctactgaatactgggtgacagttcaattgagagcttctctgtggttctggtagttccttgtccatcgtaatgtgggaagagtgggaagcagctggactcctagatacctgcagaagttgtccaggctctgacagtgccccaggttgcgggcagaacagctggagtctgctcagagatgagagtaaatgtgtgttctttgattctatgtgtggacgctgactgaactttgtgggtcagtctgagtgtgagtgtagttgtttgcagtttctctgtccctgtttgggctttgggacacacagagtcccgagagtctaacctcttagatgcagcttgaggaaatatggaaagctagtgtgtgcaggaggggtgaagaggccacaactttttatgaaaagtctcacaatcccaagagggtcacccggcccaagaaatcctgcgcaggcaggcctgcgaggctttctgtctggaatggtttctagccgggtgtgtaaaatctctgctagtcaacaagtcagatttgtatccatcttactcagaacaccgtgcttatcatacagcaagcacttggcacacctttatctggtgtcaagtagacgagggagtgtcttctcttaggaagaaactcctatgcacaattggtgtgtgtgtggtggggggtgtgaatcaatgcaaccactatagaaatgtttgtggattcttaaaaaatgaaaaatggaactaccacaagactctatttcacttctggacctatatccagagaactctatactctatcataaggatatttgtacctccgtgtataatgctgctttattcactatagcaaagaattggaattaacctagttgtccattagcagatgaatcgatagtgaacattttgcatatatataaaaatggatactattcatctcttgatttattttttgctgccttttgtagtcaatattatatttcgttatcacaatattatcatttcaagatccgtccacatgatttgccctctcaatctgaggcccctggtctagacctacagtggatgcctactgccgggaataatgcaaagtctggactgttgtttttcctgtttatgcagacctgtgataaaatatcagatatgtcagacacagtcagatttaatgaccaatctccaaacagaacagttacagtacagctgtggtaaatctcctctctcccctcccctcccctcccctcccctcccctccccccctctcccctcccctcccctcccccctctctccttggtaagttttgtgagccctaggtctacttggcttgcagcaagctaggtagttctgggaccttaatgtagtcctccttgggactctccaggaagacagaagggatagagtgaatcactctccatacaaaaaggatttagtagagtggcttacaagctgtgatctggatagtacaatggctgtctnnnnnnnnnnnnnnnnnnnnacggagttgccgtctcttaaaaaagcccctggtctagacctacagtggatgcctactgccgggaataatgcaaagtctggactgttgtttttcctgtttatgcagacctgtgataaaatatcagatatgtcagacacagtcagatttaatgaccaatctccaaacagaacagttacagtacagctgtggtaaatctcctctctccttggtaagttttgtgagccctagtctacttggcttgcagcaagctaggtagttctgggaccttaatgtagtcctccttgggactctccaggaagacagaagggatagagtgaatcactctccatacaaaaaggatttagtagagtggcttacaagctgtgatctggatagtacaatggctgtcttccaacagaaagctcaagaatccggtgttgtccatagactggatgtctcagcagctcttcagtatacactggaatcccaagaaatgggctctaaactcagtgaaggaataaacttaccagggagagtgagggcaagcaggccaaaagcagaggtgcttccatgtcctttgcataggctgtcaccagcaggcatggcccagatttagggtaggttttctgacctcaaatgatccaatcaagaaaaatccctctcagtgtgtgctttgcacaccgttgatcccatcgctcaggaggcagagacaggcagatctctgtgtgacctaaggtagcttggtctacatagtgagttgcaggccagccagggctatgtaaaggctctgtcttaaagcaaaaaagccagacaatgttgacacacacctttaattcgagcacttgggaggcagagacaggcagatctctgagttcaaggacaaccagagctacatagagaaaccctgactcaaaacaaaaacaaacaaatccctcacagacataccctgcaggttcccctttaattaactctagatatactcaagttgacaaccaagaatagctgtcctggttggacttgaactcaaagcaatcctcttgcctcagttttccacatgcaggtattacaggtgtgtaacataagttctggtttaaaaatctctcgttaccttaatttttaatgtttatttatagatctaattttatgttaaagatctaattttccttttgttgttctgagatggggtatcatgtagcacaggttagccttgagctgtctcaagctaaagatgaacctgaagctctgctcttcagcttccacctctggagtgatggaatttcattataggccttcacaagctcacttcaggcagggctggggtttgatctctattcctttggcatgtctctacccattgagccatatccctagcacactcattttatttgtttttttgagacagcctcatgtagcccaagctggcctctatgaccttgaattttttatcttcccgcttcctcctccctgatgctggaattacagagtgtacagctatgccccagttcatgtgctgccagggatgtgaacacagggctccattcatgccaggcaagcacgctagcagctgagctgcacccaaggccctacttctgttagcataattgtaagtatttttaaggtgctgtgcaatatttcagtataggattatgttttttaaatgacccaataagggttcttaacatgtccatcaagaacattcaaaatccttttcaagtgatttttaaaaatacgatcacttgtccactgtcctcacatgactgttcagtggcacaccaagatcccttaaccatcatctgaaattcagacccactgatcatcttccctccaccaccgtcccaggccctgcctccgtaagtaacccattccacttcctgctaggaacggagtgcttttagattccacacctgaattagaacatgaagttcttgtcttcctgtgcctggctcattcacttatgtcctctgggtctgtcaatcctgctgcaagtgacagggtctcattcttttgtagtgtagccttggctgccctggaactcactctggagaccaggctggcctcaaactcagaaatccacctacctctgcctcccaagtgctggaattaaaggcatgcaccaccactgcctggctagggtctcgttcttatttatgactaaataacatttcgctgtgcacactacagagctatcgtaacaaagcacatacatacagtgctggcataaagggacacacacaagctgacgactcaggacagcagttcgagagctaactccacatagtcccgtccaattgttttttcagcaaaaggtatgaacgtacattggagaaaaaagtctctctgacgaatggagctgggaaattggatatctctatctacgtaagaacaaattcagtccctcctgtttcctatgcacaaaacccaactccgtgtaagacctgaaactactgggacaaaaagcataggcctgggcatggtgatgatgcctttgatcccttttgtgagttcgaggccaggctggtctgcatagagcatcccaggccagcttgagagatagaatgattccctacctcaataacaacaacaacaacagcaacaacacacacacacacaaacacacacacacacatacacacacacacacactcactcactcacttaggaaaaacacttgggtcatttgggtcaatattcttcataaaagatcctcagaagagcagtggtgagaccctgtgagcactgagttctcctctcttggccctggttttggattcctgccttttggactacaaccctcctcacctggcctccataaccccctatctccttcctctgcagccacccgggagtcagcctttgtccatgccatcgcctccgctggagtagctttcgcagtgacacgctcctgtgcagagggatcagctgctatctgtgggtgcagcagccgcctccagggctccccaggcgagggctggaagtggggcggctgtagtgaggacattgaatttggaggaatggtctctcgggagtttgccgatgccagggagaaccggccggatgcccgctctgccatgaaccgtcacaacaatgaggctgggcgccaggtatgtgcacagaagcccagggctgtagagcaagggctgctttttcaccgggatgtccagtggggcaggacaagggatagaggggaggtgctcttggtgaccaggctgctctgcttgccttctatcaagggacattgtgcccagctgtacctcaagtgtccagtgtgctcccagagaatgccagactcacctgtggacatagggttcctggaagtagacaggtggcagaagtagctgcagagcacatagtctctgaggattccgcgatgaggagatgtccatgagaggacaagacgtgaagggaggagaagagggatggagggcagacacgtatagtaggtacagattgaactgagatagagggttagagtgatagagatgattgatacaggctactgaaacagacgagagggtgagagaggggaggggaggggagagagaggcagacagacagacagacagacagacagagagacagagagagaggagagagacagagacagacaaatagagagatagagagatacagagagatagaaagagacagtcaggcagacagagagagagagagggagacagagatagaaagacagagacagacacagagagagacagacaaagatataggaagacagagagagaggagggagagagacagagacagaaagacagacagagaaaggcagacagagagacactcacagagagagattatcacaaggatctggaaatacagaagggagccatgctaacagaacactgttgaaggttccctccctctgaccaggttatacctggatctcaggagctaacactgggatttcaggagaagcaaaggtctgaactttcatgcacagacagtgttttaccacagcagctcatcttcaaatacgcttagcctccctcacccagagagccctgcttcccttctctgagagtccagataggtagtgctcagcagcatagcagagccaagaactgagtaatgggctggagagcgacctcgaaccattcaggaatgcatatcatcaggtgtcaggtatggagagaaacagagctgactgtgggggtcaaaacagagagacttcttcacagtgtattttaaaggcattttaagctaggtatgatggtgcaggcctgtaatccggacgcacaacaaaggcagggcaggaggatgagaagttcaaagtcaacctcactatgtgtttgaagccagtctcatacttaagacctagtctcaaaaataaagaagagaaagaaaaggaaagaaaaggaaaggaaaggaaaggaaaggaaaggaaaaggaaaggaaaggaaaggaaaggaaaggaaaggaaaggaaaggaaaggaaagatactgtagccaggcacctgcctatctttctctgtagcagacattcagagatgtgcttttctgaggacaaactgtcacagtgaaacttacttccatacataacgaacttcagacctttgacctcttcctaaagcccaacactagctcaaaggctctgacccttcagacaaagaacaggatactctctctggaaaacccagctcttccagcatgaacagaggggtgcctagaacagggatcactttacagtgagtgtgttgggagtgacaactgcctcccacctgcaggaatttccagaaagcaatgtggggtgcaggggtagtggtgcaagtctttaatcttagcactccagaggcagactagtggttttctgggttcaaggccagcctggcctatctagagagttctaggacagccaggatctctgaatttgagtctagcctggtctacagaatgagttccaggacagctgggcacaaatttaataatgtaaatacataataacaacatttcatcaggagttttgaagggtatgttcacgagagacaagggaggacatgaggagaaaggcaaagacataaggcaggagctttcctagaactgatgttttagaccacacaggccggactgcaaggatggggatagagagagagatgacttgggtcaagagctcttgatgtgctttttagaggaacagcatttggttctcagcatctacaccaagggactcataactgattgtaactccagctcctgctaccttctggcacatgcacacacatggcagcaccttaacacacacacacacacacataaaacatttttaatctacaaaaatagggaagccatcttccccaagatgtattatgaaattcagagcacaacctaaagaaaccctccaaccttcaaagagaccacttgatgtccctgcaaaggttgagggtgggaggaggagagcaacaagagcatcattggaagctagaagaaatttgagcaacactttgggattccgagtgataaaacgattttaatccaagaattttattcccagccagagtatgaaagatttgcttttctactacattagaaaaggtttgactttagacagtatcatttcccaaggtttaccaggtggctgtgagtacgtaggtgtgtgtgtgtgtgtgtatgtttcccagtgtgtgtgtagaagttaggggacacctttctagagtttttttccttctttcctttttcttccttcctttgttccttcctctctcttctctctgtagtcttgcctatcttggaactcactctgtggaccaggttggtctcacactcatagtctccctgcctctgcctcctgcgtctgggattaaccatgtgtgccatcactgccctgcagaagtgcttttctttctttctttctttctttctttctttctttctttctttctttctttctttctttctctctctctctctctctctctctctctctctccctccctccctctctctctctctctctctctctctcccatccctccgtccgtctctctctctctctttttctctctctctccttctttctttctttctttctgtttcttcgaggcagggtttctctgtatagccctggctgtcctggaactcactctgtagaccaggctggcctcgaactcataaatctgcctgcctctgcctcccaagtgctgggattaaaggcgtgcgccaccaccgccctgcaaaagttgcttttcttatttgaccatggacttcctgtgataggacacgggtaactagcttagtggtagatctttacccactgagccaccttaccatccctttaaaatttttttttcttttttgagacaaggtttcatgtcttccaagctgacttgaattttcaatgtagccatcttccaacctcttgcttccacctcccaagtgctgggactgcagacatgtactaccacttttagcttatgagatgctggggatccagtccaggcctccatgcccagcacgcagggaccccatcaactgagcttcatctccaaccctggcgattggacatcttaaagattggattgcttagagaggagaaaatacagggctgacccataacgagtgtgttaatcacataacagaaagttgtatgggaaaggaaatgtcaccttagagtaagcctgctaacacagccagaaccgtgggcagtgagtactgaagggagagatcacgctactgttttcagggcgggaacggggagggtttggctgtatagtgggaggtaagagggcgtaataattttcacacttcatggtaagaaagcaacagaaaatacctcccattcaaaaatcaagacacagcaagacaagtgctgtgacagcccgcataccacaaggcacttccttgcgtggtcaggaaacacaccacacaggcaagcaccggccccatccctgttttaacagcaggtctcagtggctattgagattcttgaccaagtaaaacaaaaccaagagagactgaaaaaggagagatggcaagagtctcctctcagaaagcctggctgcaagagagagggatgtgggcgctggactagctggataagccaggcatggtgttattcttccatgcccatgggccagtttgataggcaggaagggtaaagaagcagtggaaagtcaggtgaggtgcaagcagggccgaagccagaatgatcagagcattaagcccatgctgtccaatatgaatccttgcaagccacaacctgagctgcttggatagttactagctctcaggtagttatagtgaaaggatagctagagctggacggtggtggcacttgcctttcatcccagcactctgagacagaggcaggtggatctcagtgagttagaggccagtggtctacaaagttctgagacagccagggctgttacacagggagaccctgtcttgaaaaacaaaacaacaaaaaagaatacactgagagtttggagagatggctcagtggttaagagcactgactgatcttccagaggtcctgagttcaattcccagcaaccacatggtggctcacaaccatctgtaatgggatctgatgcctacttctggtgtgtctgaagtcagctacagtgaactcatatacatagaataaaaaaaatctttttaaaaaaagaatacacagttaaaatacacttggagtcctttgaaaggcagtcttacggtgtagctcagactggcctccagccctcagtaccccagccttagcatctccagtgccactgtgattgttcatagtcatgctcctccagcacgctgggctggctttgatctttcatcactctctcctccttctgtccattttatgacaaatgacctgtcaccatagggaaggcagtggccagtgacacgtggatataacccatgtctcagactcatggtagttttacagagcaggtgggaagcaggcaaggtccttgagaaggaagcttctagcaacctaatagtttcctgcctcgatttaaaatgttttagctgtcatggtaatggaacagacttactgggtaaaatgagaccttcaatatgtgaacataatgcactgtggccaagcaggctaggaagcatccttatcgcctgaaaaatcatttcaactaggcatgatggtgcttatctgccattccagcacttggaggcacagacaggagaactgccacaagttcaaggctagcctgagctatgtcactgagttccagaccatccagggctacatagtgagaacctgtctcaaaatgaatttttttttctatttgaatgttcaaaacctactcgtcattttgaagcagtactttgtctactgtggtggacgctttgtgctatagaataccaacagatatctattcctcccttccaatgatgacctcttcaagctcctactacttcttagcattgccacacttgggacccagcatccagcatgagaaccttggccacagccagatctaaacagtagctaaccccatggccagcttgttatttcagtagtgcagtggatgttgaaattatgaatgcagtatcctgcatgtgtttcctactttggggcttaaaagactcagtgtgtgctttgcacataacggtgcttgttggaatgtaagaggaaagacaccaggagctgtccagagcagatgcttacagcctgggcaggaaggctacatgtctggagcagaggaactgggatggtccctgtggtggagggggcttggaatctgagggcaatggacaaggcccccttgtccccacgcatttccctacagaaaaggaggtaggagtccctacttcttgaaacacctatttccttccctgtaaagggagcaaggtctacattgttcatagggaaagctgctgtccatcccggccctgtgagtatagggagcactctaagcagcccagctcagtcttcacaccgtagcatctgctctccacattgtccctccagcatccccaacctgaagctccttgcttcctgtactccgtcctagacactcctgcaaagagaattagctagacccacagggagaaagcagctcccaggctcctgagggcttggatctggcagagaagacccaggtcaccatagagaagatagtagcactaggtgaccaaagagaggagtctgggggcgggggcttatggagaaggtgggctgcagagagcagaccccctggttgagccgcgctagggaccagtgcagacacacttctgtgcttgcctcctcaggccatcgccagtcacatgcacctcaagtgcaaatgccacgggctatctggcagctgtgaagtgaagacctgctggtggtcgcagccggacttccgcaccatcggggatttcctcaaggacaagtatgacagcgcctcggagatggtggtagagaaacaccgagagtctcgtggctgggtggagaccctgaggccacgttacacgtacttcaaggtgccgacagagcgcgacctggtctactacgaggcctcacccaacttctgcgagcctaaccccgaaaccggctccttcgggacgcgtgaccgcacctgcaatgtgagctcgcatggcatagatgggtgcgacctgttgtgctgcgggcgcgggcataacgcgcgcactgagcgacggagggagaaatgccactgtgttttccattggtgctgctacgtcagctgccaggagtgcacacgtgtctatgacgtgcacacctgcaagtaggagagctcctaacacgggagcagggttcattccgaggggcaaggttcctacctgggggcggggttcctacttggaggggtctcttacttggggactcggttcttactagagggcggagatcctacctgtgagggtctcatacctaaggacccggtttctgccttcagcctgggctcctatttgggatctgggttcctttttaggggagaagctcctgtctgggatacgggtttctgcccgagggtggggctccacttggggatggaattccaatttgggccggaagtcctacctcaatggcttggactcctctcttgacccgacagggctcaaatggagacaggtaagctactccctcaactaggtggggttcgtgcggatgggtgggaggggagagattagggtccctcctcccagaggcactgctctatctagatacatgagagggtgcttcagggtgggccctatttgggcttgaggatcccgtgggggcggggcttcaccccgactgggtggaacttttggagatccccttccactggggcaaggcttcactgaagactcatgggatggagctccacggaaggaggagttcctgagcgagcctgggctctgagcaggccatccagctcccatctggcccctttccagtcctggtgtaaggttcaacctgcaagcctcatctgcacagagcaggatctcctggcagaatgaggcatggagaagaactcaggggtgataccaagacctaacaaaccccgtgcctgggtacctcttttaaagctctgcaccccttcttcaagggctttcctagtctccttggcagagctttcctgaggaagatttgcagtcccccagagttcaagtgaacacccatagaacagaacagactctatcctgagtagagagggttctctaggaatctctatggggactgctaggaaggatcctgggcatgacagcctcgtatgatagcctgcatccgctctgacacttaatactcagatctcccgggaaacccagctcatccggtccgtgatgtccatgccccaaatgcctcagagatgttgcctcactttgagttgtatgaacttcggagacatggggacacagtcaagccgcagagccagggttgtttcaggacccatctgattccccagagcctgctgttgaggcaatggtcaccagatccgttggccaccaccctgtcccgagcttctctagtgtctgtctggcctggaagtgaggtgctacatacagcccatctgccacaagagcttcctgattgctaccactgtgaaccgtccctcccccctccagacaggggaggggatgtggccatacaggagtgtgcctggagagcgcggaaagaggaagagaggctgcaaatgcgtggtgactgactgtcttctgcctggaactttgcgttcgcgcttgtaactttattttcaatgctgctatatccacccaccactggatttagacaaaagtgattttcttttttttttcttttctttctatgaaagaaattattttagtttatagtatgtttgtttcaaataatggggaaagtaaaaagagagaaaaaaataagtttgtggtttgttctagattttcccttttattaacaagcattaggtgtgcatactaatggagtttggtatggaattcttcgatgatcctccccacccccaagggtaattcacacctccctgtcccttatcacttgtgggtctgcactatgctgagaacctaaacatgccaactcaggttcagggtcccagagccaagtagagactgtcgacaagcctccagggagggatgtggggtcagaattccaagaaaagagaattgaaatagctaagtcaagaaaagagccggtcaactgtagaaaaatctggaacagggtagatctgagagcttgaatagaggggtgcaggtgggttaaatttaagcaagtatgggagcgggggaagcatacagtagttaggatactttggtagttccagtgaacagatgaaaagtcacaggagaagaggcttaaccaagaccccctcacacgctggggatgcagaggagacgtggagcagatcgcctccctgtgacttcatgctctcacagcccattccccagaatcatgtatttagggtgggcagcccttggtatttgaggacagtggcctggcttgctgctgctggcttcttatgtgtaaagtcaacagatcttagactttagtcctcagaccctgtcaccaggaatgtttcagattctcacccaaagaaagcaatgggagggaggggtctttgcctcaggagctgccatgttcccacttgctttcacaggggcgccagggcctcagtcaagacaggcaaggctaatcatcctgttggcaaaccaaatgatggggcaggtgtcagggcgccctgggagtgaggctagagatctctcacaaagccatacttcttttaaggccacacatctgcccaagcaagcctaccatgtctctgctcctctccctggtcccccatctccatccccatactgtccccacctctgagtcctattctgatgtccagatgtcagggcaaaggatgccctgcaaagctgagagcagcagtcccagtcctacctctcaaaacccaagctgaagccgagtatagcagtgcacgcctttaatcccagcactcgggaggcagaggcaggtggatctctgagttacaggacagcctggtctacagagtgagttccaggacagccagggctacacagagaaaccttgtcttgaaaaaccccaagaaataaaaaaattaaaattaaaattaaaaaaaaacagggggaaaaaagcccaagttgagcacagtcattgttcttgtgtcccatttatatcccaacccagatccaagtgatttgaaagccagttagaagatggccataagaataagcctaggaagtgtcttatgatgtccaaggtcctttagctgtcgtgatacatcatgacctcatgaaccttagaactaggaaaccctgctggcctctagaggaccaagggaaaggatctgaaatatagtcactgttgacataggggaatgctggttaggacaaccaggaagatcattaagtgtcctctcaaccctcccaggggacagtgggactgcctgtcccagaagaggggaagataattcccagaccctaagagctgggaagagaggcagtgaagtgagaggagaaacaggcaaggcccttctagacccatttgattcaacactgtagagttggtcggtgatgacagctaaagccgaggctgctgtccacatgccctgtgaatttgtccacaggcctggtaacagaatactatgtcacactgcctgaaactctgaatgccacttgtcagagcaggctgccactggttttatggcaggaccacttaagggggtccttaaaccttcaaagcaatcacaagcaggcctaagaccatactagactcacctgtatccttaaagaagaatattgaggagcctccaggtcttgggacataaagatgagaccaggcatggctccactgcatgctccaggcacatcttttgttcaccaacccactggctaagctttctgatcttccagaacacagattcaacctgtagctgctgatccatggtctgagtcagctcagtctaccacactaagattctagaccctccgtggtcacactgtcatacctaaacaccaatgtgcccagagtccaagtagggtacaaaaggaatagccagcctggcttgaaggtattggcctataatccaagctgccccagaagctaaggcagaaggaccacaaactcatgattgcctgggatacagaacaaggtgaagatcagctaaagcgattgagtgagaccctgtcaccaaatgaaaagtgataaagaactggggtgtacctcagtgacagaggactttcctaatgtgtgaggctctggactccaccaaagcactgaaaagaaagaaaaaaaaaatcacagactgtgagggatgctgacagctaagtggccttgggaaaggagtgccatcctggggctctctggcctctggccaggtctgtttggggtttgtggaggaagaggcccaggttctggattctcagtacctcttctttagccttctgattccctgactcctggcaggcaggcaggcactccaatgacatctatgccttcacacggctccctcttctcattctcagggctgcaggtgtatgtacaccaggccctgacctactattggcaggactacctaggatttcccagtaagggcaagggtcagtgggggggtagggagggcaactagctgcaggtggacactccaaaaagaggatgccatggtccagggccagccaaggcagaaggatgggcgcccattctcccctcagggcagtgaatcatcaggtgagtgggcaggttcaggaagagtccaattagcccgctgggccatcttgggtgctaacaataatagagccatcagtccctagggcagtgatgagagtcctcagttaagcctgtccgacagatgagtagtccctctaagttggcaccctgggcaggagccaccctaattgctacctgctgccctagtgcccagatgaaagggacagactcgactgggaggcggcagggcagtggcaaaaccagcatgtcacgagggcctggaaagtcagaggccaatgggtatggggtgccaggctgtctcaagaccccagtagggtctaatgtcacatggcttttggggatgcagagcccatatgcccaggcagaagacagatcactttagaaggtcaaaggctaggaagcatatagcctacagaggaggcagcattggcctgagggcttgtcagggacacaggtgggctctggtgtctggtgtcagttctgagcagcagcccctacaagtccaggatgaaagactaccctagagattgtcttggctatccacaggagatacacgactaggctgtggtcctcatggctgtgttatgaaatgaaagctctggccatacccttgcccataccatcatttccattcatggaaagctagtcctcaggtccattttctcagtccctagccaggggttcaaccacagctggatgcaccccagctgcccaagagtaggatccagaaagtggacagggaagggggcgacagaaaaatagagggtcagtagggacccagggggaagggttcatgaacagagcatccacattccaggggaacacaaggtagaccccagataacggcctagtcatggagagtaggtgatgaaaccctgaactcattgcctggaaagatcaagttccactcctctctgagcctcagtttcccttcctgcagaaggaagtaggatgagctacaacccccccagtccgaggggtgggaaatcccaggccccactcagacccaagctcgcagctgtgggcctcagaagcagcctctctggtgagtttacagcccctcccgctgccctggagaaggaggaaatgagcgggaggcctgttcacaggtagttgagacagcccccgaataaccatataaaagggccggaggctgggggccccacccagccaggacaggcttggccatccccttgcaaatctcacactcagtagctttgaagtactggaaagggtgtggccaacccccaccttagggccccactgaccctccctttttctgtcaccccctcccctggatgcccactttctgggtcctggggctcagtttcctctcttcagagacagactggaggctgtcaccatggcctggcctccaggaaaacctactcttggtcagctggggtgcagccagctgtggttcccacccctggcttgggactgagaaaatggacctgaggactagctttccatgatgtgggcaagtgtatgaccagaagccagagtccccagcccaagcagtcttggtagtaggatctagcactgccttttccagggaacactggggacaacagggcagccaggagacaattttgagaagtccctaggaccttcctgaaagctgaccacccactgttggggtgagagaaaactatgatgttctgttgctgtgtagctggtgatcaatagctgggccaactctgagtcctagcaaacctggcccagccataatgatctaccttgaagggactttgggatacattactgccctggagtccagcgagcgtcctgggacagattcttctccccctggctttaccctgcaccatgccacaggccccaggtcccacctctcttcaccagtcgctcaccttccacagcctagtcctttcaggggttcccaaatttcttttcagaaactctcttggggggggggtacccagaacaacacactctgagattatagccttttaggatcatcatcctctctaaggacctctgacttccagagccagagtagaaaccaggtatacacacttactatccctacagccctaaggggccagcgtgccatcctactggagtctagtattggacagatatatgagtctgggatagtccagttggctagagtctttcatagatttgaattgaactgtactctcaatgctactcttaggctatgtgggaaggcttccaacaaggtgctgcttctgccttctgatgtttgttaattctgagataccatacagatgccaagacaaatagtgcagggcagctaggaagccctggaaagggcccccaactccaggagcttgggcactgcctacccttcctaccctgccctgctttgcctggtcgggcagctgggacggagctgcaagctgtcagaaggtgctaattgttgtttagctctaagccggctccttgctctggtcttttttccaccctctctctcttttttatttgagcgtctagaactcatggtaaatagtcatttggctctcagagccctgcaaattggtgtttatggtgtgaagatgaggaggacccaggactagtccaccaaaacacaggccagtgaagagggaggagagagggaaggaggcataggcccagctgggactgggcatcctccacgtcccatccaggcctagctctctgctgcttgatccaggagagcttccaggaagaggctcctccgtcatccttagcagtggggagactggagattgaagaactagagcaggacccatatttagcataggagatactgaagaataggaggagagggatagagagagggaaggaaggaaggaaggaaggaaggaaggaaggaaggaaggaaggaaggaaggaaggaaggaaggaagaaagggaggtgaatggggagggagggagggagagaaagagagagacagaaaaatccaagtacatgggcccttcttacccagtggcctcccagatttgagacaggaatgtatggcttctgtatgatgcttgtggggtgcagggtgtggaaggcaggtgccagaggaattccaagcccgagcagatggctgggagggcttctcaggagaaggggacttccccagttgttcgcctctcagtgcagagagcaggcaggcctgtgcagaaccctcagactccttggcagtggtggctcagcagcctcccttccccatcccccaggctcctcagctccctctactgcaggaagcccagggtgttcccacagcctcactctgtcccttctccattcctggcacaagcttgagacactctgccaccccacagtgccagactttataaagcaagctggcttctaagcagcccaccagacacacagccctggaggggcgagtcccaaagctctaagaaggccatttgacgtctgtagcttggagtagactccagggattacacatgcttcttccccgactgtttttattgtccaggtctgggttggggcaataaagtgaagtgccagcttgcacctcggggaccagggactaatctggtgggagtcgtgacccaggcaacagtccatatgccatggacctgatcctacacctcctctgcttaaggatattccatggtttccctgtgtccaccaggtgaagtttaacttctcaagcctacgtacctggcaatctatccccttaaaagagtcctgatgtatggcgtgagagactgagaaactgtcctgcacaggaggtgtatacggacattactcttcagactgcaacggacgcccgcctctatcactcattccctcagatgctctcggacctccatgccagccttctcaccagttctaaaagaagtctctctcgggtctctagccttctctctcccaggtcctgaactttcaatgggttcttctgactctggaactggttgcaattccttgaccttctctggtcacattcaggagcccccatcactgtctctggggggacactggaagtaccagcttgacctcagggacctgtatggcaataaagggggggaggggattctgatgtcagtgtaaccttgatcattcctggggcttggaagcatacccagctgaaccaagagcttgagcttccaagtgacccatcaaccagaggaccccacacctgtgagagcagggagggcggcctcagaaccgaggccttgtctggtccttgctgttgtatgatgggaggttgtttgacagatgcaatggatgaaccatgcagaatccaagcatgacagggatgaggccacagcgcaggtggcgaagggccatgtgaggtctgggaaggtggaaaggatgcaggagaggaccttacaggggaggaggatgccagtggagatggttcaggagaggacctcgtgggcgggcctgaggagacagtgcagatgaggtgtcagtaaggaggatgcaagcaagaaagatgcaggagatgatggagaagctgaagaaggcactgaagaaggcacagggaagaagagtgcatgttaggatgttcaagcagagacggtgcagtggtgagggtgaaggtggaggagattcagatgaggatggtacaggtgggatcctgcatatgctatcaggcaggtggcccagaacaatgagcctggccatggtctatgagggacgcacacactgggaatggtacctacaaggttctgaaagtgcaggcttttggagaccaccctccccccaaagaaaggggtttctaccccttctccagttcttcccttgtgctttaaccaaaagcaagtcttgtgcactgtgcccaaccaaccctgcactctgctgaacctgaggcaagagtagaaaggctgctgtcttttctaacctgtaccctgagccaactaggtcagagtcagaggcctcacatacgtgagtagccctggttggagggatctctaaaccccaccacagtcctgggacagcctgctgtttcctggggtcaggggtcttccatgggcccactgccgtcctagtcagctttgcttctgttacttggggattttttccagtctttcccttccgtttagaaatccttttcaggacagatccctgacagaggtgctgacatcattaggcctcctcaagggcacaggcccacccttctgctctggctacccctatccctaacccacagcccagctctgccagggtccaggcctggctggcagcccgcagactacccagaccaatgtgttggctctaggcaggcaggcatcctgaagggtctaacagtgtcctttgccaactctccactgaagccgatgctggcctgtgcctttccctctgcctctttttctttccctcgctgccaccacactcaggaatcatgggaccctctggtctttgagctacagctctgtgcaggtagcacagcctcctccttcccttccctccctcatacatgtggctgtcgacccctgtctctgcaataagctctgggtgcctctgactacgcctctgacagtcctaactagtgtgggctggaacacagtggccaacatatgtaaatgctggaaacccctctcataatagagatggcaggtgtggagctccgttgagcctgaaggtagagggcagagtagtgatggtctacgggccacatctggtccctaatggtgggagtcaggacctgcctggtttcctcagagccagagtgggaatacagaggcatctggtatcttaggtcaagggatttctccagcccttacaatgtgagcaggatgttgctgtcaaggctactggacagctccaggctctggagaccacctgaggagatatggacgggccagcccctggcacagtccagattttaccacggacccagcctggggcacaggtgttaggggtggggctcatgttggcgggagtgctggctgcggatgcttcagctgggctttttaattaacctctgctggctgctccaaagggccccaattaagtgcagaatgcgatggcagagtggggtcaaagagaggagctggttttaattaaagtgcagtggcctgggcaggagcgcccccgcctgaccgcctcctcaacaggccctgctcagctcaaaggcggtcacgtgacgggtagatgacagagaactctgcagtcctgtctggctgagatcccaccagataacagcaggaccaagggctgccttgtctagcctgtgtgtccactgccaggcagcccctcttcgagccactttgtcctctctgacctcttctcatttgtcacctgacctggaatagccatctgctacctctcaataagcaggtccctggtataataagcatctgtggtatgtctacttcagaagcagcaaaaggaataaaacaaacaattccatcagatgtgcatgggcaatgggattaagcaaaatggggggggggcgggggagggggagggggaaggcagtggagagctgtttaacctggtaaaggagcagatagcagcaggaaggggagggagctcacctggagaggtaagggcctggtaaaagccagagcaggatctggccagggctgagttgccgaggtaccagcaaggccaaagcctgcaagcaaaaataagagagaaagccaggcttttctccaaatggccagaagactactgaggactctcaacataattagctttccaggaaatgtaatgaaaaaccctgggcgagggccggtgagctaccaccaagcccggaacccacacagtaaaagacacagctgacttctgcacacacacaaatgcttgtataagcatatacttatacacatgcatgcatgcacttggaagtggaggcagcagcattagaagttcaaggttaccctcagttacatagggattctgggcctgcctgagctacatgaggtcttgtttcaaaacaacatcagcaacaacaaaattggatcctaaggtgacagtagagtgccagcctccctcctgctgcaaattccaggcaggtgttccccacctattacaatggtcccaagtaattttttttttaatgttatgggcattttaacacacacacacacacacacacacacacacacacacacacacacacacacagagagagagagagagagagagcatgcgtgcaaggggataaggcctttgtgcttcacttgggaagaacaggtgttt

SEQ ID NO: 30 - DNA, 2737 bp, Mus musculus
cagagggcccagcgccactgcagccgcgccacctcccagggccgggccagcccaggcgtccgcgctctcggggtggactccccccgctgcgcgctcaagccggcgatggctcctctcggatacctcttagtgctctgcagcctgaagcaggctctgggcagctacccgatctggtggtccttggctgtgggaccccagtactcctctctgagcactcagcccattctctgtgccagcatcccaggcctggtaccgaagcagctgcgcttctgcaggaactacgtggagatcatgcccagcgtggctgagggtgtcaaagcgggcatccaggagtgccagcaccagttccgaggccggcgttggaactgcaccaccgtcagcaacagcctggccatctttggccctgttctggacaaagccacccgggagtcagcctttgtccatgccatcgcctccgctggagtagctttcgcagtgacacgctcctgtgcagagggatcagctgctatctgtgggtgcagcagccgcctccagggctccccaggcgagggctggaagtggggcggctgtagtgaggacattgaatttggaggaatggtctctcgggagtttgccgatgccagggagaaccggccggatgcccgctctgccatgaaccgtcacaacaatgaggctgggcgccaggccatcgccagtcacatgcacctcaagtgcaaatgccacgggctatctggcagctgtgaagtgaagacctgctggtggtcgcagccggacttccgcaccatcggggatttcctcaaggacaagtatgacagcgcctcggagatggtggtagagaaacaccgagagtctcgtggctgggtggagaccctgaggccacgttacacgtacttcaaggtgccgacagagcgcgacctggtctactacgaggcctcacccaacttctgcgagcctaaccccgaaaccggctccttcgggacgcgtgaccgcacctgcaatgtgagctcgcatggcatagatgggtgcgacctgttgtgctgcgggcgcgggcataacgcgcgcactgagcgacggagggagaaatgccactgtgttttccattggtgctgctacgtcagctgccaggagtgcacacgtgtctatgacgtgcacacctgcaagtaggagagctcctaacacgggagcagggttcattccgaggggcaaggttcctacctgggggcggggttcctacttggaggggtctcttacttggggactcggttcttactagagggcggagatcctacctgtgagggtctcatacctaaggacccggtttctgccttcagcctgggctcctatttgggatctgggttcctttttaggggagaagctcctgtctgggatacgggtttctgcccgagggtggggctccacttggggatggaattccaatttgggccggaagtcctacctcaatggcttggactcctctcttgacccgacagggctcaaatggagacaggtaagctactccctcaactaggtggggttcgtgcggatgggtgggaggggagagattagggtccctcctcccagaggcactgctctatctagatacatgagagggtgcttcagggtgggccctatttgggcttgaggatcccgtgggggcggggcttcaccccgactgggtggaacttttggagatccccttccactggggcaaggcttcactgaagactcatgggatggagctccacggaaggaggagttcctgagcgagcctgggctctgagcaggccatccagctcccatctggcccctttccagtcctggtgtaaggttcaacctgcaagcctcatctgcacagagcaggatctcctggcagaatgaggcatggagaagaactcaggggtgataccaagacctaacaaaccccgtgcctgggtacctcttttaaagctctgcaccccttcttcaagggctttcctagtctccttggcagagctttcctgaggaagatttgcagtcccccagagttcaagtgaacacccatagaacagaacagactctatcctgagtagagagggttctctaggaatctctatggggactgctaggaaggatcctgggcatgacagcctcgtatgatagcctgcatccgctctgacacttaatactcagatctcccgggaaacccagctcatccggtccgtgatgtccatgccccaaatgcctcagagatgttgcctcactttgagttgtatgaacttcggagacatggggacacagtcaagccgcagagccagggttgtttcaggacccatctgattccccagagcctgctgttgaggcaatggtcaccagatccgttggccaccaccctgtcccgagcttctctagtgtctgtctggcctggaagtgaggtgctacatacagcccatctgccacaagagcttcctgattgctaccactgtgaaccgtccctcccccctccagacaggggaggggatgtggccatacaggagtgtgcctggagagcgcggaaagaggaagagaggctgcaaatgcgtggtgactgactgtcttctgcctggaactttgcgttcgcgcttgtaactttattttcaatgctgctatatccacccaccactggatttagacaaaagtgattttcttttttttttcttttctttctatgaaagaaattattttagtttatagtatgtttgtttcaaataatggggaaagt

SEQ ID NO: 31 - protein, 350 aa, Mus musculus
MAPLGYLLVLCSLKQALGSYPIWWSLAVGPQYSSLSTQPILCASIPGLVPKQLRFCRNYVEIMPSVAEGVKAGIQECQHQFRGRRWNCTTVSNSLAIFGPVLDKATRESAFVHAIASAGVAFAVTRSCAEGSAAICGCSSRLQGSPGEGWKWGGCSEDIEFGGMVSREFADARENRPDARSAMNRHNNEAGRQAIASHMHLKCKCHGLSGSCEVKTCWWSQPDFRTIGDFLKDKYDSASEMVVEKHRESRGWVETLRPRYTYFKVPTERDLVYYEDNFCEPNPETGSFGTRDRTCNVSSHGIDGCDLLCCGRGHNARTERRREKCHCVFHWCCYVSCQECTRVYDVHTCK

SEQ ID NO: 32 - DNA, 30615 bp, Homo sapiens
aggccgagatgggcggatcacgaggtcaggagatcgagaccatcctggctaacacggtgaaaccctttctctactaaaaatacaaaaaaaaattacctgggcatggtggtgggcacctgtagtcccagctactcgggaggctgaggcaggagaatggcgtgaacctgggacgtggagcttgcagtgagccgagatcgcgccactgcactccagcctgggcgacagaacgagactctatctcaaaaaaaaaaaaaaagaatttggaaacatatccttcctgtttgatgttcaaaggtccttttctgaagttatgatggtagatattttatatatatatatatatatatataatatctactacatatctatatctatctatctatctatctatctatctatctatcatctatctatcatctatctatatcttttcctgtctcaacaaaataaaagcacttggcagtcctctgttagtccccagatgctctctgatacttgaaaagcccattaaatccaaacctagaaacgaaggatttgttaagatccctctagtccaaaagttctgagatgcaagagacaaaggaaccatcaaagctcatctcatgattccctgcatctgacaactgcactgccctcagctgtgatggagccttgcctggcagctcttctgcctttccctaaatgcccacctcttaccacctagaactccctcaccttctccgactttatccatccatccatcatccattcatccatcatgcacgatccaccatccatcaattcatccatccatccatccaccatccaacatccatcaatctatccatctgtcaatctgccatccatcaatccatcatccatctatccatcaattcatccatccatccatccatccatccatccatccaccatccatcaattcatcatcatccatctatccaccatccctcaatccatcatctatccacccacccatccatctacccattattcatcaccctcccatcccaggcctgcctcagagctcatgttgtcaagccttgctatgtgtccttgtcctctctactgcctcccttgtgaactgtaagctcccaaaagcacatggtttagcacagtcccaggcaaaaaacctaacacacacaccaacaaagcctcccaccagagatagggaaggcttcccctggttcattctccttaccaaggcaaggactctcttctcctgaaagtgggtcatccaacctctgttttattatcaccaggacaggaactccttcaactttcagaaagcctaggttgttagaaattgtatcatattgagcagcagtccactttctggaggatttttttttcttttgatggagtctccctctgttgccaggctggagtgcagtggtgtgacctcggctcactgcaacctccgcctcccgggttcaagcgattctcccacctcagcctcttgagtagctggcactacaggtgcacgccaccatgccccgctgatttttgtatttttagtagagacggggtttcaccatgttggccaggatggtctcaatctcttgacctcgtcatctgcccacctcagcctcccaaagtgctgggattacagctgtgagccaccgcgcccagcctctggaggattttttttactgtggttattgagagtgggcaccttgcttcttattcatctcatattcctcattcagcccagtgcctggctcattagggactctcagatcctggatggatggatggatgatggatggatggtgggtggtggatagatggatgaatggatgatgggtggatgatggatgaatggtgatggatgaatggtgatggatggattagagatggacagatgatgggcaacagataggtgatgaatgtacagatgatgaaggggatgatggatggatgatggttgaatggtggatgggtgatgaattgatgatggatgcatgatgaatggataatgggtgaatggatggatgagtggtggtagatggtggatgatgggtaatggatggacaatggatggattgtggatggatggtggatgatggatgatagatgtatggataatgtatggatatggatgatgaatggatgaatggtggatgatggatgatagatggatgatggatagatgtggatgatggatggatggataatggatgatggatggatgtggatgacagatgatgggtgatgggtggatggatagatgggtggtggatggtggatgattgtacatgatggatagtagatatatggatgatggatggatggatggtgaatggatagatgaatttataagtggatacatggtaggtggtggtagaggatgtatgataggtaatggatagatggatggatggatggatggatggatgatgcacgatagatgaatggatagatggatagatgtggatgacggatggatgaatgaacgaaaggaaggaaagatagataattgatactttggatgaattcagtaaataactgctaaatgagaccacaacaagtttctgggaaagatggttttcccaggtggaagatacttcccttacagaacaattttgttatgcagtttcctttcttcttcctttctccaacaactgattgctgtgttagaataaaagtcttgggcctgaatggggcaggccttaggtggctcaaaaagttcagccaggctccttcccaggtgacttggccaaattggcagcatttgtgtctaagcaccctgcctcccagtagcctgtgtcccattccagtgggaactccgacagtccactctaatgaaggcattttcctgctgactgggatgatttcctggccttctgggatggctggcacttcccacgggcaagatgcctccgtttcacccccatagctgactctgttgtgtcaacaaaagcagaaacccctgacaaaggtgtttgtggtagagaacttggtttccgtggaggctggctgccagaactccagagcctggacgtaagtcctggcctcaggggagccctgagtcagctcctctgtaaacagaggtgactctgggcagtggttcatagcctgcatgcttcaaacacctgtggaaatctgatcaaagcaatggattctctctccagaaagatgcccgtgctcccagacataccccatcgtttgtgctattttgggagggtagtgaacctgctgcagattccctctagaaccttgggtggaatccaacccataggctcaaatctcctgccgctgtgcctgccacttggacattctggggggtcttccttctgcatggtttcaggacattttttaactttttatttattttattttattatttttagattagagatgaggtctcattctgcctcccaggctggagtacaatggtgtgaacacggctcactgcagccttgaagtcctgggctcaagcaatcctcctgcctcagcgtcccaagtagctaggactacagatgcacaccaccatgcccagctcatttatgtttgtttgttttttaagaaagggggtcttgctatgttgcccaggtttaactttttattttgaaataatttcagactttcataaacatcgcaggagtggcactgagagtcctgggtcccctcgtccaacccagtggtgcataactatgccaattgttcaaaactaaatgtgttctattcaccacactctggacgtcactcagctttccttcgtttttctatcaagatcccttttctgtcccagaaccccctcctgggtcccttgttacttttggtgatgccatgcctctggcttctccactcttccctgtccctcatgcccctgagacctctgaggagcacaattaggcattttgcagaacagccatcaatttgggttggtctgatgtctcccgacaattagatgcaggctgtgcattttgggtgagaatacctcaaaggctatatttggccttcatgcatcatccctggagccacaaggtattgtgtgtcccatttcaggcaaggttaactcagtccccagaataaggtggtgtctgccaggcttctcctgtgcacagttaaggtttttcccattgtgcttgataaacactgtgagcagttgcggaaccgcttagagaccttgtggcttcaactttaatgcaggctctctttgccagaacatagggtctcacgcttttctggcctgtggtcttgcagcctgcagcttctacttcagcctcggatgggggtgtctgtcctgggatctgagcctctctgcagagacttcttgtcttcagtcttcacgagtgaattgaaggcctgctccagggttttctcagcctggcagggagctccacctccacatgtgatggaagagaaaatcaaggttcagccagctggtgaccaaactgagcaagaatgagctcttttctgtccaagtggaagccctcagcaccacccgcccttgcccttgagtgtgtctggctattggggctgtttgcctgagttttgataagcagggatctcgaggcccttgttatgggcagggcatgagtgaggcacagagagccctagcctcaggctctggttctcctcttaccagaagctcaggagcaagagggaggggctggccttggagacagactcttgtagtagccaggccgtgaggtgggaaggcagactcagctggggtggggtattcagggtgtgggatgcccaggccatttgggagtgagaaggtccggccaggagggcaggtggagctgtgtgccatgcgtgagctccaggagcacccaggacactcctcaactctacctctcaagctgccctagaagggaagcagggcagatggcaggggaaggggcgctgactagggaggggacgacctgagtcctttaaagacaagaacaggcgctcaggcctggaggcttagagaggaagtgctctgcatccagccacacgtgtattcactcagaggcagtgggttcagcaaaggcccctccaggcctgtctgtgaactgatcagttgtgttagggaagtaacatggggtcaggggtgggggctttaagtttcttggagaggtgcggaggaggtggctgcctagctgctccctgggaaaggaaacagcggaggttgcatgatgggcctgggtgccttagaggggcaagggtgggtctgctctgggtaggctcagaccctgctcattccttgactcagcccacggctcctgcctttcattctggccccaggaaatatctatgggctgggccttgtgctccagattgcaaataaaaggtgagccaaacagtccctgcccctaggcagccgcggctagggagggagtcagtgggcaaatcttcctggttggggaggggcagccaggtgtagaggacacccgatccctggccgctcccctcagagcaggcaggggcacagcaggtccagcctgagccaaggaaggaaccggaaagagcccgaggggaggacaaagggctgagtgcggcctgaggccagggagtggcattgaggtcaggagaggagatagatccagagggggcctggcatggccaaactggcattgggcgaagacctcagcctgcagatagtgtgttgcgagggagaggtgtgcatgtgtgtgcatgcatgtgtttgcatgtgtgtggtgcacatgtggaggggtgtgtgtgtgtgtgcatctgtgtgcatgcatgtgtttgtgtgtggtgggttgtgaatgtatatgtgcatccgtgggaggtgtgcatgtgtgtggtgtgtatggtgtgcatgcatgcatatgtatgtgtgtgcatgtgtctgtgtgtgcattgcacgaggcgtgcatgtgggggttgtgtgtgcatgtatgtgtatggtattcatgtatgtgtatgtgttgtgtggtgtgtgtgtgtatttgtgtgtgtgcatgtgcatggggtggggtgtgtatatgtggggtatgtgcatgcatgtgtgtgcatgtgtatggtatgtgtggtatgcctgcatggtgtgcatgtgtgggggggatgtgcatgtatgtgagtgcatgtgtatgctgtgcttgcatgcatgtgtatatgtgttcatgtatgtagtggggtgtgcatgtgtgcttgtgtgtggtggggtgtgcatgtgtgtgcatgcgtgtgatgtgtgcatgtgtgtggtgtgcatgcctatatgtgtgtgtttgcatgtgtgtgtgcatgtgcatcaggtggggtgtgcatgtgtgtgtggtatgcatgtgtctgtgtgcgcacgcatgtgcgcatgtggctgtgcatgcatgtggtggaaggaggaagctggaggctggggcctcctaggggcctcttcatggcgaggtgggagatggacccacagataagaaccaggaggggcaaattggctgagaggccccagggccacctgggaaggccacagcagcctgggcggctggggctgtttcaggactggacagtctccagccagcaagcagagcccttcctgagctggtggtgggaagtggatacagaagaaatggacagttttcttctgggcttgtggctggatgcagtgggtgtccaggcctgacttggacagggccctagggagggacggggctgctgggacccgccatcagggggctgttggccaatccacagaaaagtcaaccaaagcaggcccgaggggctcagggggctttgtcaacagccagggggatgccagtgcaaagccatagcctcaaataccttccactttgtatgttcttgttatgggagcaacgtgcgttcttctgtgctggctgtgtgtggatgtgtgttgggccgtgtgggagcgtctgagtgtgtgcacactcactcgtgcctttctgtcccagctggcctgggctcaagggcatcacgagccccaggggctgctgtctcggtcctctcctaggcagcctgcaaccacatgcctgtgtccctgagttaggccattcttgcattgctataaagaaacacttgaggctggtaatttataagaaaagatgtttaattggctcagggttctgcaggctgcacaggaagtgtggctcttgcttctgcttctagggaggctaggaagcttccaatcatggcggaaggcaaagggggagcaggcatgtcatgtggcgagagcaggagcgggataaagagtgggggaagaggtgccacacacttttaaacaaccagatcttgcaagaactcactcataatctcgaggacagcaccaagccatgggacccaccccccatgacccagtcacctctaccaggccccaccccagccctggagatcacagttcaacatgagatctaggcagggttaaatatccagactacatcagccccatccacccgaggatgaaagctccctggatgtccaggtggcagaggaggtcacagccccctatgatgactctgttgtgaccctaaggggtccattgcaggcctctgccaaggaggagcaggggacactgtgggacgtagccctgtatccccgccttgtcccatgggaggaccctggctccaggagaacctcaggcctccttctatccccatagagagggcccatcggagctcccttctccctcctgctctcccagggcctcgaggggagagagaaggtcagagccaaggaaaggtggaggctcaggactctcccacaacagaagcagagacatggaggaacctgccccagggcacacctagcccccagaggccaagccgaggctcaggggctccaaagcccaggtgtcttcttgctaggtctgtaagatccctgcccagcagcaggtcaggctctttcctggttggctccctgctagttccccagctcagactgcaatgcttggcaaacagcaggcactctgttcctcacctgtgtcagagtgtgggtccaaagtgagtgcctgtctctttttattttgtttttttgagacaggttctcactctgttgcccaggctggagtgcagtggtgtaatcatacctcactgcagccttgaactcctgaactcaagtgatcttcctgcctcagcctcctgagtagctgggattataggcccccagccctgagtgtcttttatcaatggaagcagggcctggccaggcccaccccctctcctcatgcccttgcagaagtgtctgcatacacccacccccaagacacagctcattctttcaacctgtctggggaagcctggctggggtcctggcctctgcaaagcccacaccaccgctcattcccatccctctgatcctagcctccagagctttctcctaaattccagccctcccctaccacccttctgcacaagcaatgccacttccccaacttggcctctatttccccatttggggaagaaggaagctgtgtacaaggacccaggcagctccaatgtcagcagcggcagacaccctgcagccttccaagctggaggcaggggcatttggggcactggggctggccctggggaggcgggcactggaagtcactggtgttgagaagattccagaagaggcagctgtaccgctgagccatgcaagtgtcggtgcttggggtggaggaaggcaatggcaagtggcacagcagaggtgggcggtgtgtggggtggagccacactctggggtctgcaccccaggctatctgggcagcagaaggaattagctcttgtctggttttacctgccttcgttcagttgtatgattattttgagatcctttgtgctatttttcttgttattcctaaattaaatgctgttacagacttgccactgctttttaaccatccctgttaatggacattggggtacttccagtttgtggcttgtgtgaacatttgcttacaagtctttgcacagacacgggtttcctctggggcaaacctaacggctggtggacgtttacccttgaagacactgccaaagtgcctcccaaggggactgcacctttcccctccatccagctgtgaacaagggtcagggtctgatttctccacatccttgccaacacttgctactctttgactctttgattgcagccatccccgtaggtgtgaggcggccccttattgggttttttgatttgcacatccccaggatgggtgatgtcgaccatctttccaggtgcatgctggccttccttgtgccttttttttaaagacagggtcttgctctatcacccatgctggagtgtgactatagctcactgcagcctcaaactcctgggctctagcaatcctcccacctccgcttcctgaatagctgggactacatgcacacaccactgcaccttgctaattttaacatttttttgtagagatggggtcttgctacattgccaaggctggtctcaaactcctgggctcaagcaatcctcccacctctgcctcccaaagggctgggattacagatgtaagccaccttgccagctgtatgttttttaagacagggctggagtgcagtggtgctatcctggctcactgcagcctccacttcctgggctcaagtgatcctcccgcctcagcctcccaagtagttggggccacatccagttaatatttttagtttttgtagagatggggtcttgctatgttgaaaaggctgtcctggtctcaagcagtcctcctactgtgcctctcaaagtgctgggattacaggcatgagccactgtacttagccaaagttgcttgttaaaaagagcctggtaccaacctcccctctctcacttctgtcaccatgtaatttcttgcacacactggttcccctttacgccccctttcccttctgccacaagtggaaacagcctgaggcccttgccagaggcagttgctggagccatgcttctgtgtagcctgtagatccgtgaaccaagtaagcctctttgccttatacaccacccaacctcacgagttcctttataacaatgcaaatgggctaagacccctgacctgcccaaggcggtcctttgagctgagccctgttaaccctgcatctctcctctctctacagctaccagggagtcggcctttgtccacgccattgcctcagccggtgtggcctttgcagtgacacgctcatgtgcagaaggcacggccgccatctgtggctgcagcagccgccaccagggctcaccaggcaagggctggaagtggggtggctgtagcgaggacatcgagtttggtgggatggtgtctcgggagttcgccgacgcccgggagaaccggccagatgcccgctcagccatgaaccgccacaacaacgaggctgggcgccaggtaggttcgccgcccgcaagggtgcttgggaaaaaggagcctcctcagcagggtgtgtgccctggttccttggggcatatggcccggtgaggcaggatggtggccaggctgagggtcttctcgacccctgcctggggtgtgcgaagcttagcaccatccagctacaccacagcatccagtgcgctcctggggatggcgagcccacctgtggactggggtagccaagaaggagtgatgaggcaaaggcctggtcaacaggagccccggcagagcccagggagggagacagccaggcagccacagagacggggaggaattctgcaatgaggaaatgcaggcacacaaggtgacccgatgtcaaggacagctggcagtaatttagggggagggaggctgggagagcctcccaggcagcctggaggtgaaagacaacaagcgacttggtgggcagagcacagagtgtaatggaacaaagagcatcttgatctgcagaggccaacccaaaccaagccgtgtaaagcttcgtgagcctgtgtcttattctgtctgtgctgctacaacaaaataccttagactggataatttataaacaatgggagtttagtactcacagttctggagactgggaagtccaaggtcatggtactagcagataccttgtccggtgagggcctgctcctcatggatgatgccttctgtgtcctcacccagggtgtggatcgctctggggttacttttataagggcattgttttaggccattcttgcattgctacccgagactgggtaatttatgaagaaaagaggtttaattggctcatggatctgcaggctgcacaagcttggtaacagcatctgctcagcttcttgggaggcctcagggagattttacacatggcagaagtggagtggtagcaggcacgtcacatgggccagagcaggagcaaggaagacagagtgggggagaggtcgccacgcacagatcttgtgtgaactcactcattatcatgaggacagcacaagccattcatgagggatctgcccccataacccaaacacctcctaccaggtcccacgcccaacactggggattacacttcaacatgaaatttggagggaacacagatccaaaccgtatcaggcacgaatcccattcacgatgctccaccctcatgacttgacttgatcaccttctaaaggccctacctcttaatgctgtcaccttgagggtaaagatttctttctgggggggtggggacacagggtcttgctggatacagtggcaccatctcagctcactgcagcctccacgtcccgggttcaagcgattctcctgcctcagccttctgagtagctgggactataggcgcatgccaccacacctggctaatttttgtatttttagtggagatagggtttcaccatgttggccaggctggtcttgagcttttggcctcaagtgatccacccacctcggcctcccaaagtgctgtgattacaggtgtgagccaccatgcccagccgagggtaaagattttaacccatgaatttttgaggaacacaaacattcagaccacagcagcttgctagaaaggatgtggtcagaagatcagtggatggccaagggaggaaagatggctgatgggcagtgacgggcgtaaggaccaagtggcgtccacgggatttaacaacatgaagatggcagctgaccttggctgtagaatcaggggaccacagaggggtgacgagtgaacaggggatattcaccttttaacagtgaggaactagataactcagactaatcttcctgcagaagacaacttcagatgcaggatgaactataaaaagcaccctgttaaaagtgtggagtccccataattacccaattcatgatagatgaggcagtgcagtgccatgggagaaatgggcttttcaataaatggtgctcagtcaaccgggtggtgctatggtctgaatgtgtctcccaaaattcgtatgttgtaagcttgatctccagtgcaacagtctggagaggtgggacctaataagaggtgtttaggtgatgagggccttgccctcataaagggaccaatgctgctgtaaaagggcttgcagaagagggtctctctctctctctctttctattactttcctgccatatgaggacatgatgttcctcccttctggaggacatggcattcattcagggtgccctcttggaagcagataaaccaagccctaacctgtcagcaccttgatcttagatttcccagcctcccaaaccatgaaagaatacatttatgaattactcagtctcaggtgttacgttgtagcaatacagcattgactaagacagatagcaacatggaaaaaaaataaccctggcttgctacctcacaccatctgtaaaaatcaattacaaatcccagtgggacaggtaaaacaataaaacttttacaagaaaatatagaatatctttgtgaccttagagtaggcaaaggtgtcttaaacagtccaaaaaagcactcacattgaaagagaagtggaataacatagactatattcaaattaagaactttcatccataaaaagacaccactatgggactgaaaaggcaacccatagaggacacattcacatacatacatccacactcacatatgcagcaaatgtagagaagctacagtaggaaaagaactctgcagactaagaaaaaaaagatagacaaaccaatgggaaaattggccaaaaaattaaaagccatgttatgaaagaaaatatagaaattccactacctatacaaaaggtgctcaatgttatgagtcatcaagaaaatgctgtgagaacctatgtcctggaaagagagaggaggatgggggtgtctgagacactggtgttctggggcaggtaatttgtaaaattttgtatattttgcacttatgacacatatatatttttgtatgtctattatacttccataaaatgatttttaagtgtcaaataactgaccatctagtgaggaattagcagcccctgatccaagagaagatcccaagtctggtacctggggtagcttttgtctaggggccatttgctgacctggaagagactacagaggttgcactgcatttccagcagactcacagagctaaggggcccaccaagggtgccatctctggtaaatccttcctcagtgtaggctgtgaccctgaagagcaaagccaagccagaagtagtcttgtcctgttcacatgggcagactagaaatctctcaaaacctgaacttggattaaggtaatcccaaattgctggtactcccatacacctggaaaaagcagacaaaatcctctttggagaaggatgatatccctcctctaagcctataaatgtttctataataattttttagaaaacacaatgttggctgggcgtggtggctcacacctataatcccagcactttgggaggccgaggtgggcggatcgtgaggtcaggagattgaaaccatcctggctaacatggtgaaacccggtctctactaaaaaataacaaaaaaaattagccaggcgtggtggcaggtgcctgtagtcccagctacttgggaggccgaggcaggagaatggcgtgaacccaggaggcggagcttgcagtgagccaagatcgcaccactgcactccagcctgggcgacagagtgagactctgtctcaaaaaaaaaaaaaaaaaaagaaaacacaatgtccagcacacaatcaaagataatctatcacatgatctgatgacacagtgagttaaaccagaaaaaaaaaaaaaaacacaagtacacagggaattcagacaatggaattattagacacagactttgaggggaaaaatgcttacttaggttcacaaagctaaaacacaagtgtgaacattgcatcaggaaactagaaactataaaaattatataataggctgggcacggtggctcgcacctgtgatcccagcactttgggaggccgaggcgagttcgagactagcctgaccaacatggagaattcccgtctctactaaaaatacaaaattagccgggcgtggtagtgcacgcctgtaatcccagctacttgggaggctgagccaggagaatcacttgaatccaggaggcggaggttgtggtgagctgagagtgcaccattacactccagcctgggcagttttttttttggaaactgggagttttttttggaaactccgtcccaaaaaaaaaaaaaaaaaaaaaatatatatatatatatatatatatatatatatatatatatacacacacacaatagatttggaaaataattacacagaaattgcagaactgaagaacaaataaggacttccagttaaagatgagaagctgaacacttccgtctgcactctcctggaacccactaaaataacaataaattaattttaaaataaatagatatgtagagataaatataaataaaatataaatagatacaggtagggacaggtaatagtagatatagatgatagatataaatggatataaatagtgcatagagattatacatagatatagatgctaatacagataggatggatggataaatagattagatagatggatgaatagatagagatggatactcatgagaatacagaaaataaagaggaaacaatggtaacaaaactttgaaagctaaaagcagatagatgaatactcaagcagactcaagaaaactgagtcttaagccagtagagaagaaatttgagaaccagtctaggaattcctagtgtctgatatcttgagaagttgagataaatatggggctgaaaacaggaagattggttgaaagatgactttcagggtactttatagcccactcactccactacccaactctttgtagccaggcagcagcctctcctttccctgttgctgaagcctggaggtttgttttctgcaaagcacaggtctctgatctgagggacgccaagcacatctcagagtgaaccttccaaagtgaaaattttctctctacatatggaagttcatgcctttctctctcctcctgatttcctaatgctagctgtgaaccctagttatcctccaggcaagaggatggaagattctgctctggggactctgaccaactcaaaagaggagacttcaagacagttacctgtggaaggtcccaataaagtgatgcagctagatcactctatagagaggaccaaagttgacaagtctctcccatgtacaggaacttccaataagatttttagtgtcccatttttaaatacgagcagacagccaaggatcatcagacctctgaggaaggactctaacaacaataatggcaaagtccaaaacaaacaaactcaaacaaaatttatgggaaagagacattgtaaagagagatgaaacttcgaaagatgatcattaatatccccaaaagataaaacactatatccatgaaattggaacaggatggtaattttaaacattcaggttacaaaagagctcttagaaattaaaaatatgataacagaagcaaaatcctcaaattgaaagatagttgagataccctcccacaagacagaaagaaaaaaaagacaaagagattaaaaataagagcaaggagaagatttggaggatctgtccaagaaagacaatgacaaacaaaaagaggaggcagtcagcaaagaaacaaggcaggaagcttcctcagaactgtggagcacaggttgcagaccaaacaggccactaagtgacgagaacaacagaagaaaaagatctacttcaagacacactgctgtgaagctcagagcctactgcacagaacagccctccaagctgccaaggagaatgtttgggcttcaggatcaggaatcaaaatagtaccagacttttcgggagcaataatgaaagctagaagaaaacagtaataatactttttgaactccaagatgtaaaaatgattttaagccaagaattcacttcccagcaaaactatcaattaaatgagatagtagaaaagattgtttttagacatggacatttcaaaaaatttacaaggccttttctgggaaaaaaaaatctgcaagaaaatgaaattgatagaatagctgatgtgtttggacatcttgaagagaatatgtagataagtaagggagaatttgaggctgaatcagttacaggtacattgataacaccaactacaaaaagtcatttaggaaaagaaaagtcatcataatatatgacacttaaagtagtcccaataccaccagcagtgaatattgatgtgaaattaagctagtttttagggcaggaggggttggtgcttgggaagtgtgcatcagtgtggtggagtaaggagagaaaactaactgccacccaccatggctagaggccaataaataatgcctaatgctgaaaaatcaagaggtgtcaagacaagtgtgttaacagagttgtagacattgcaaggggctgcatgtaggaccagaattcctgtttatctaaacaggtcttggaaactgttggactcttccaagtaagcacctatataactttgatccaatataaaactaaaacaaaagaggaaataaaatggatattagataaactagactgggcagggcgagggatatgttactctacagatgcccataggaaacagtcaatatcagagggaggagttcaagaaagagccagaaggggacgaggaggaggcaggattgggacccagagcccagttgaagccttagattagaactgtccaatagaaatagaatgggagccacaaatggctcatagattattataatttgtcccacaaatgacacaaagatcattataaattttctagtagccacatttaaagagtaaacaggtaaaacaagtttttttggttttgatttggtttggtttggtttgagacagactctcgccctgtagcccaggctggatggagtgcagtggcgcaatctccgctcactgctgcctccccctcctggctcaagcaattctgcctctgcctcccaagtagctgggatcacaggttcccgccaccacgcctaatttttgtatttttaatagacacgtggctttgcctcaagtgagccacccgccttggcctcccaaagtgctgggattacaggcatgagccaccatgcccggccagaaacaaattttaataccaaatttgatttaactcaggatagccaacatgctatcatttcaataatgtagtcagtattaaaattatgaatgagctgtttctcatccttttcttacactaagtcttgggaatccagcatgcagttggcacgtatagcatttctgaattcacactgccatgcctcatgggctcctgtctgtccagtggctgccacagtgcagtgccacctagactgttctgatgttcacatgccccttcacgctcacccctaccccttccccaaagaaagaagggaaaagaagctgagttctacactgcccataggggaaaccgttcgctcctcagcgaggtcctgcccggtcccccaacagccttatgtcccaacattgccttcctcttcctctgcagtccccatacagtgaccagcttcctgggccactctctttactcatgctcaggactcgtgcctttccacccagccgtatacacctctgggcagcgtgcctgagtcctcagggtcagaaggaacgcctatccccctgcatccctgcactctgactgctgtggctcttcgtgtatggcatcccacgctgcagctctgtccttcattcgctccaccctagacagtgtagaagtactcagctaggagacgggaagaggggagccccccaagccctgacctgggaaggcttgggtctggcaagggagcaggcaccagtatctgcaccataggaagggggtggccctggggccctgcctgggagtctgccccctctgcccgggggctttatggagcaggtaggctgcaggcgacatgtaatgctgtttcctcggggagacgcaccagggggccgccctgacgctggctcctgcgcgtgccccgcaggccatcgccagccacatgcacctcaagtgcaagtgccacgggctgtcgggcagctgcgaggtgaagacatgctggtggtcgcaacccgacttccgcgccatcggtgacttcctcaaggacaagtacgacagcgcctcggagatggtggtggagaagcaccgggagtcccgcggctgggtggagaccctgcggccgcgctacacctacttcaaggtgcccacggagcgcgacctggtctactacgaggcctcgcccaacttctgcgagcccaaccctgagacgggctccttcggcacgcgcgaccgcacctgcaacgtcagctcgcacggcatcgacggctgcgacctgctgtgctgcggccgcggccacaacgcgcgagcggagcggcgccgggagaagtgccgctgcgtgttccactggtgctgctacgtcagctgccaggagtgcacgcgcgtctacgacgtgcacacctgcaagtaggcaccggccgcggctccccctggacggggcgggccctgcctgagggtgggcttttccctgggtggagcaggactcccacctaaacggggcagtactcctccctgggggcgggactcctccctgggggtggggctcctacctgggggcagaactcctacctgaaggcagggctcctccctggagccagtgtctcctctctggtggctgggctgctcctgaatgaggcggagctccaggatggggaggggctctgcgttggcttctccctggggacggggctcccctggacagaggcggggctacagattgggcggggcttctcttgggtgggacagggcttctcctgcgggggcgaggcccctcccagtaagggcgtggctctgggtgggcggggcactaggtaggcttctacctgcaggcggggctcctcctgaaggaggcggggctctaggatggggcacggctctggggtaggctgctccctgagggcggagcgcctccttaggagtggggttttatggtggatgaggcttcttcctggatggggcagagcttctcctgaccagggcaaggccccttccacgggggctgtggctctgggtgggcgtggcctgcataggctccttcctgtgggtggggcttctctgggaccaggctccaatggggcggggcttctctccgcgggtgggactcttccctgggaaccgccctcctgattaaggcgtggcttctgcaggaatcccggctccagagcaggaaattcagcccaccagccacctcatccccaaccccctgtaaggttccatccacccctgcgtcgagctgggaaggttccatgaagcgagtcgggtccccaacccgtgcccctgggatccgagggcccctctccaagcgcctggctttggaatgctccaggcgcgccgacgcctgtgccaccccttcctcagcctggggtttgaccacccacctgaccaggggccctacctggggaaagcctgaagggcctcccagcccccaaccccaagaccaagcttagtcctgggagaggacagggacttcgcagaggcaagcgaccgaggccctcccaaagaggcccgccctgcccgggctcccacaccgtcaggtactcctgccagggaactggcctgctgcgccccaggccccgcccgtctctgctctgctcagctgcgcccccttctttgcagctgcccagcccctcctccctgccctcgggtctccccacctgcactccatccagctacaggagagatagaagcctctcgtcccgtccctccctttcctccgcctgtccacagccccttaagggaaaggtaggaagagaggtccagccccccaggctgcccagagctgctggtctcatttgggggcgttcgggaggtttggggggcatcaaccccccgactgtgctgctcgcgaaggtcccacagccctgagatgggccggcccccttcctggcccctcatggcgggactggagaaatggtccgctttcctggagccaatggcccggcccctcctgactcatccgcctggcccgggaatgaatggggaggccgctgaacccacccggcccatatccctggttgcctcatggccagcgcccctcagcctctgccactgtgaaccggctcccaccctcaaggtgcggggagaagaagcggccaggcggggcgccccaagagcccaaaagagggcacaccgccatcctctgcctcaaattctgcgtttttggttttaatgttatatctgatgctgctatatccactgtccaacggagttagacgaatagatgtgttgtgttttttttcccttttctttctatgaaagaaattgttttagtcatagcttgtgggtttcaaacaatgggaaaagtgaaaaaagagaaacaagccatcaaggctgtggtctgggctggatgtttggtggtgggtcagcacggtgttgaaagagtagagaagatgcccactcaggggctcagggcctgggtccgggggcagggggatgccccagggccgtgatgggcaggggacctccagagctggaattccatggggaaggaataaggatagccaagctgaggaaatgagggaacggccactggcaccaaggcctggagcagagtagagcctctgacagggagagagcagcaggcacctggaggccccaggtaggcagccctaaggtaagggggttggccgagcccccaacaagtcagtagagcagcaagacgcccaccacctcccctcccgcagagcctgtactcactcagctgataccttagcaccagctatggatgtgccccctctctaggtttggggacagtggcctggtggtataggatcagctggatcccagcaggaccttgggatgggactggccatcaggagttcctctgggatcctcacctcgtggggctgtgcacaggggtgccccctgtgcgagcccccatctcctttccccagccaaggaaggcagggagagcccctggaacaggtgagccatcctgccgacaggagccctcatgaggccttactaggggtgctgggtgtgcctctggaaacaggcagcaggagcccaagggctgtctcaaggccatgccttccccgtcccagccccaccaaggatctctgctccactctctgccctcccatgcctgtccagtccccatgcccatctctgggccctgactggatgctcagccagaccttcagggcagtgaatgccaagggaagaagctatggagatggggcagccaggagcagccagtgtacctgcctgcaggccgggcccaacacagccaccatactcaagccatgtgcacgccggcggggagccaggccttcatagaacaggaatggctggccatcccccagtgtgccccatggtaggaaggggggtcaaggcagccccaggagtggggtgggtgcaccagcgtcctaggcatggaggtcatgggaacacaatccccaggcctcaagagccagagaagggccagccccaggcaggagcataacccctccaggaacagtgtcccctgaccctgccacgcacctgctgtcctggaccctgagggcacaggcccagggcatgcagctaaggctgggcagaggggcctgagggactgctgacctccctccccacaccctcaccccaaggtgccctcacggctgcccagcaggacaccctctctaggccacactgggcctggccaccctctctgggcaccattttcaagctagagcccttgctcctgacctttgtgacgggtccactagaagcctggccttcccaaaccccccacctgcccctcactatccacttcctaggtccccctggtcctgtgcctcatccacctccctaaggctacagatccagcccggcccccaccagagccctgctcctccccaccccaggtcaggtctttccaccccactcactgcccagggcctcctcacagtgctggcatagtgaagcctcacagcacccacggagcaagagagcataccgccctctaccataccctgctggctgcacagggcttctgcccaggtctggctgctgcccaacccctgcctgcagcagccttgcagaacctcatgaagcagaggctcccacccgaggacagtcaaggaggccaggcccaggaggggatgagggctgaagtgtggctgctggggtggttgtagggagggagtgtttctccagagccaccagccatgggagcacagagctacccagggcctgtcagggccaagggagaagggacccggtccaggactctggaggtcaggcacccctctcctttgcctcccaaaactgtgcctcagcttccatgcacccccaaggtctggtgggcaccccaatatcactcccagccatggcctcattggctggggccgtgacacccatcccaggtgggtcacccactgctccagggcagccctgaccctccataggcagggccactggaattcccggggggcaccaagggcagctgtgctaccgtctacaaagagggagccagtgactaagggcataggacccctgtggtgcatcaccagtggggggaccccaagcccgctcaacccgccaggccttcctgagcaatagccataaagggtcagtccttgggggagggcagtgccccacaggagcccctggtcagccccagcccatgggcacagtgcctcttagtcgggacccaggtcacagccaccctaattagcacctactgggccccagtgccaggggcattgcagatgacagacactgacccagccgggaggcggctgggcaggcagagggcacgagatcatgggcatggctgccaggttgcagggacctgagcagtcagcataggccggggcaagagcccacacccagatccaggccagggccaactcggggctcaaagctgaggtaggccccagagagatccccagcacccaggctctatctccgctgctggggcccagagaggagatggtgctggcctgaggacacacagtctgctggagacccagggggccatctgggtggagagccgaaggtccccttgcaggccaggtgtgaaggaccactgtgaagatggtctcagctgtccccatccccactgtggccctagcacagacagagggtgaccccacaagaggttctggatgtgtttctgaggaatgggggtcggctggtctgcagcccctggggccataggacacaccccagtttataggcaatgggggctgggaggtgaaacgctcaactcaccctgtgtaggagcaaggcccactcctgcctgggcctcagtttcttttctatgtaaaaggcagtgagccaagggaggtcttccctcccacgggcctgctggcttgggctgctgcacctggtgcatggcctccctcacctgccaagggcaggcatcaccccgggagccccagcccccaacccccccggagcctgcaggcctccaagtcagtctcagaagccaccccccagggcgtttatagcccatcctgcccacccgccctgcagagggaggaaatgcgcctggtgggcctgttcgcaggtagttgagacaggacaggaataaccatataaaaggcccggaggtagtggggccccaccccaccagggctcccctgcccagccccctgcacatctcaccctccatgctttgaagtcctggaggggtgtggccagcccccaacttgggcactcctcctctctctgacactcccctcctgacacctactttcaggatcctggggcctcagtttcctcccttcaaggaggatcctggaggctgccagcctggcctccccaggacgctgggaccgcagcaggcaggtgcaaggccagctccaggtccccatgcccgacatggggtgggggtgaggccctacttactgactgcccagtgcccgtccccagtgctgagcctgggcttggtgtgccccggggccctgccagccctggcccttgcccctgctccatcatgggtcctctctggaccatgctgggtcggtgggggcctgagaggctcatcagtggagacggcccctcccctctcaaccgggttccacacccagcctaactcccctagtgtgggcctggcgtcaccatcctccagtgggtgggagaggagagggcagagggcaggacccctgaccaagctctgggcctgtcagctcccaggggcacagctgctgccccaggagttgacacagcccaaaagatgaccttggctcagggggtcctcggcctgtccaaggttggaatgtggtctgtcacggcctccagggaactccaggacacaggctgagcagccaggaatgaattcagggcttccccgcagtcccttgggctatcctcaagaaggaacattctagaagcttcttgttgggggaaggcgaggcctggggaaagatgcccctgaagaggaagagaagctgggacttgggggtcccacaccccagtccttggagggggtcctccaaggaccagggcattgcagagatgatgtcaggcccagcttgccgtccaggcctcaatacgcctgtttgtgtatggggtggagtgtctgagacgtcgtcagacatcagccactcctaagccctagcaaggctgccctggccacaggtcccccgataaggtgaccctgtaacttcattccctggagccttcctccagcctggccctccccgatgtttcagccggatggatacctccgccctttcccctgcagatagcctctcaccaggaattacaatcagggccatgcactcagagcctggcatcatcagagtgggggacccaggtccccgagcccagggcggggcttggtgggtggactgtccatcctgcactgaagcctggagtgacaagccatgagagaaagtccacggggagaaccagagggggactcctgggatgcggagccagcctctgccctctgccaggctctgtcctgagaccctgcccttccatctgtaggccctgccattcctgggctactggcagagagggtagaagacgttggagcaccctgggctgcgggcccaggtaaaacaagtacagaccctgagcctggactgagctgaggatgtgccccatcctggaatataagaagacacggccctgccctggggtctgggagacacagcctcaacctgggtcctgggggaagcagtcccaccctggggtccagctgtcgacctgggatgagccctagttccctctgccctacagtggcaccaccgccccccacaggccccaccccctcccctggacagctcagccctctttcccagtctcctcccctcatggatccccctttctgcctctgaacccctagggatggatgcctcaggacagggcactcaggtccctgtcggagtcttgcttggatctggagccctggatcccaggggcatgacctcctggagcaacttccaaggtctgggggactaggtcagtgttcctccctgcagaactggactgctgtcagtggctgccttcgggatcatctgggagggcttccaggaggaggtgagcatggggacacttcctagggctccaacatcctcctgtaattctgagattgcatccctgcagacgccaggaaaaaagtgggttcccatggcagccggggagccctcagaaggggccccactgaagcctgggagccaccacccgcctgcctggccaggatgggagctcagcagaaggtgctaattgctgtttagctccaagctgactccttgctctctttttgtctctctctctctctctcttttttttttttacttgagcctctagagcacacagtaaacagtcatttggctcttggggccctgcaaattggtgtttatggtgcgaagatgaggaggatttgtccacccaaacacaggctggctgggagggaggaagcaggggtgggacatcccatccaggcccagctcggggaagcctccttcagactgaggagctgtggtctcacaagcaggggactgtgattaacccaggagagcttctaggaagaggtgaggcatccgcggcaaaaagacctcctccaggggaagctgcaaaggctccaccataccctcaggtgcccatggggagccctgccctccagacccagctgggatcagagcttcttggctgggtcacagcctgggtctccttccaacagcacacctcacctgcccacccagcagccagctgcagaattacaaactggaatgccaaggcccggtctcctggcaggagcaggaaacacagaagtccaggcgcaggcatatgggctggatgtgtggctgggaaaagtggatttccccaggtatctccccctcgttcacgaacctgaggtgggcagactatgccccagagccagtgcccgggctcctgtcttcttctgctgcccaaactcaccccaccatggcagaaggccaagaggccagactggcattgccctctccccactccatccaaggtctggcatgaggcaccggccctgcagtgccactcctcaatggagcaggcagcctgcagcaccaacaccaaaggctggggaggacatgggatgctggacatgggaaccatcaggagtgtgcaggaggggcagtgttggcgggtagtgtagaccagaatgtacagggcatgtagaagaatggatagtgtagacagggtagtgcagaggaatagcacaggtgggatagtgtagggggatagtgtggggggataatgtagggtgtatagtgtagagggatagtgtagggggatagtgtggggggataatgtagggggtatagtgtagagggatcgtgtagggggaatagcgtaggggggatagtgtagagggatagtgtaggggatagtgtatggggatagtgtaaggaggatagcatgggggatagtgtagagggatagtgtagggggcatagcgtaggggaatactgtaggggatagcacgggggatagtgtagagggatagtgtagggggaatagcatagggggatagtgtagagggatagtgtagggggaatagagtaggggaatactgtaggggatagcatgggggatagtgtacagggatagtgtagggggaatagcatagggggatagtgtagagggatagtgtaggggatagtgtagggggatagtgtaaggaggatagcatgggggatagtgtagagggatagtgtaggggatagtgtagggggatagtgtaaggaggatagcatgggggatagtgtagagggatagtgtagggggaatagcgtagggagacagtgtaaagggataatatagggaatagtgttaggggatagcatagggggatagtgtagggatatagtatagacggatagtgtaggggaaatagcatagggggatagcgtagggggataatgtaggggcgatagcataggggaaatagcgtgggggatagtgtagggggacagtgtaggggggatagtgtaagggacagtgtagggggatagtgtaaaggggatagtgtagggggatagagtaaagggaatagtgtaggagggatagtgtaggaggatagcatatagggatagtgtagcggggatagtgaagggggacagtgtaggggggatagtgtaaaagggatagtgtagggggatagtgtaggagggatagtgtaggaggatagcatatagggatatagagtaggggggatagcgtagtaggagcacggtgtagggggacagcatagggggatagcctaaaggtatagcgtagggggatagagtagcggggacagcacaggcagatagcataagggatagcgtaggatggcatggggggatagcctagggggatagtgcaggggggacagcgtagaaggatagcgtaggagggatagcatgggggatatcgtaggggggatgcatacgaggatgcatagagggatagcgtagggaaagagtaggaggatagtgtaaagggatagtgtagggggtacagtgtggggggcactgtgtaggggacagcataggggggattctgtagggggatagtggagggggcatagcataaaagggattgtgtagggggatagtgtagcggagagtgcgtagggggggtagtatagggggatagcgtcggggatagtgtatgggggatagtgtagggggacagtgtacgaggatagtgtagcggggatagaacaggaggatagcatgggggatactgtaggggggagagagtaggggagagtgtagggggatagtgtaggggtatagtgtagagggagtgtagcggggatagattgaggggatagggtagaaggacagcgtaggggaatagtgtaggggtatagtatagagggatagtgtgggggggatagattggggggatagggtagaagaacagcgtaggggaatagcgtagcaggggacagcgtagaagggatagcatagcggggagaacatagggggataagcgtaggagggatagcataggagggatagcatgggggatagcgtaggagggatagcatgggggatagcatagcagggatagtgtaggggggatagcatagggggatagcataggagggatggcatagggggatagcgtaggagggatagcatagggggatagcatagcacggatagcgtaggggggatagcatggggggatagcataggagggatggcatagggggacagcatagcagggatagcgtggggggatagcatggggggatagcatagggagatagcaaggggggatagtgtagaaggatagcgtagcagggatagcatagggggataaggtaaaggatagcgtagtgggatagcaaaagggaatagcatacagagatagtgtagggggatatcataggggaaatagcgtggagggatagcgaagggaaatagggtagaggaatagggtatggagacagtgtagggggatagtgtagggggtattttgcaggggggatagcagaggggagattttgtagggggatagtttaggggcgatagtggagggggatagcataggagggatagcgtagggggatatcgttgggggatagtgtaggtggatagtgtggggggaatagtgtaggggggatagtgtagggggatagcgtagggggatagaatagggggatagtgtagggggatagagtagggggatagagtaggggaatagcgtaggggggatagtgtaggggggtagtgtagggggatatcgtgggggataatgtagggggatattatgggggaatagtgtatggggacagtgtaaagggatagtgtggggggatagcgttgggggatagagtagggggagagtgtagggggatagtgtagaaaggatagtgtagggggatagtgtaggggagaatgtagggaggagagtgtaggggataaagtagggggatagtgcaaggggaaagtgcacagggatagtatagggggattatgtagggggatagcatagagaggatagtgtaggggaagagtgtaggagggatagtgtaggggaatagtgtaggggggatagtgtaggggggatactgtagggggatagtgtatagggatagtgtagggggatagtgtagtgggagagtgcaggggggacagggtagggggataatgtaggggagataatataggatacagtgtagggggatagcgtcgggggatagtgtagcggggatagtgtacgcggagagtgtagggggaattgagtagggggagagtgtagggggacagtgtatggagatagtgtagggggaacagtgtagcgggatagcgtagggggacagcgtcagggggatagagtagtgggatagcgtagggagtagcatggagggacaacaaagggggatagtgtaggggacatagcatagggggatagcgtaagggagacagcataggggtatagtgcaggggtatagcatagtggggacagtgtagagggataatgtttgggggatagagtaaggagaatagcatgggggcatagcgtacagtgaatagtgtagggggatagtatagggagatagtgtaggagggatagtgtagggtgacagtgtagggtgatatagcaggaaggatagtgtaggggggatagtgtagggtgatagtatagagggacagtgtacaggaagcatgcaggaggatagtgtagggcgatagtgtagagggatggtgtagggggataatgtaggggggatagtgtaagggtagagtgcagggggagagtgtagggtgatattgcagaagcaatagtgtaggg

SEQ ID NO: 33 - DNA, 2551 bp, Homo sapiens
ctctctacagctaccagggagtcggcctttgtccacgccattgcctcagccggtgtggcctttgcagtgacacgctcatgtgcagaaggcacggccgccatctgtggctgcagcagccgccaccagggctcaccaggcaagggctggaagtggggtggctgtagcgaggacatcgagtttggtgggatggtgtctcgggagttcgccgacgcccgggagaaccggccagatgcccgctcagccatgaaccgccacaacaacgaggctgggcgccaggccatcgccagccacatgcacctcaagtgcaagtgccacgggctgtcgggcagctgcgaggtgaagacatgctggtggtcgcaacccgacttccgcgccatcggtgacttcctcaaggacaagtacgacagcgcctcggagatggtggtggagaagcaccgggagtcccgcggctgggtggagaccctgcggccgcgctacacctacttcaaggtgcccacggagcgcgacctggtctactacgaggcctcgcccaacttctgcgagcccaaccctgagacgggctccttcggcacgcgcgaccgcacctgcaacgtcagctcgcacggcatcgacggctgcgacctgctgtgctgcggccgcggccacaacgcgcgagcggagcggcgccgggagaagtgccgctgcgtgttccactggtgctgctacgtcagctgccaggagtgcacgcgcgtctacgacgtgcacacctgcaagtaggcaccggccgcggctccccctggacggggcgggccctgcctgagggtgggcttttccctgggtggagcaggactcccacctaaacggggcagtactcctccctgggggcgggactcctccctgggggtggggctcctacctgggggcagaactcctacctgaaggcagggctcctccctggagccagtgtctcctctctggtggctgggctgctcctgaatgaggcggagctccaggatggggaggggctctgcgttggcttctccctggggacggggctcccctggacagaggcggggctacagattgggcggggcttctcttgggtgggacagggcttctcctgcgggggcgaggcccctcccagtaagggcgtggctctgggtgggcggggcactaggtaggcttctacctgcaggcggggctcctcctgaaggaggcggggctctaggatggggcacggctctggggtaggctgctccctgagggcggagcgcctccttaggagtggggttttatggtggatgaggcttcttcctggatggggcagagcttctcctgaccagggcaaggccccttccacgggggctgtggctctgggtgggcgtggcctgcataggctccttcctgtgggtggggcttctctgggaccaggctccaatggggcggggcttctctccgcgggtgggactcttccctgggaaccgccctcctgattaaggcgtggcttctgcaggaatcccggctccagagcaggaaattcagcccaccagccacctcatccccaaccccctgtaaggttccatccacccctgcgtcgagctgggaaggttccatgaagcgagtcgggtccccaacccgtgcccctgggatccgagggcccctctccaagcgcctggctttggaatgctccaggcgcgccgacgcctgtgccaccccttcctcagcctggggtttgaccacccacctgaccaggggccctacctggggaaagcctgaagggcctcccagcccccaaccccaagaccaagcttagtcctgggagaggacagggacttcgcagaggcaagcgaccgaggccctcccaaagaggcccgccctgcccgggctcccacaccgtcaggtactcctgccagggaactggcctgctgcgccccaggccccgcccgtctctgctctgctcagctgcgcccccttctttgcagctgcccagcccctcctccctgccctcgggtctccccacctgcactccatccagctacaggagagatagaagcctctcgtcccgtccctccctttcctccgcctgtccacagccccttaagggaaaggtaggaagagaggtccagccccccaggctgcccagagctgctggtctcatttgggggcgttcgggaggtttggggggcatcaaccccccgactgtgctgctcgcgaaggtcccacagccctgagatgggccggcccccttcctggcccctcatggcgggactggagaaatggtccgctttcctggagccaatggcccggcccctcctgactcatccgcctggcccgggaatgaatggggaggccgctgaacccacccggcccatatccctggttgcctcatggccagcgcccctcagcctctgccactgtgaaccggctcccaccctcaaggtgcggggagaagaagcggccaggcggggcgccccaagagcccaaaagagggcacaccgccatcctctgcctcaaattctgcgtttttggttttaatgttatatctgatgctgctatatccactgtccaacgg

SEQ ID NO: 34 - protein, 187 aa, Homo sapiens
MVSREFADARENRPDARSAMNRHNNEAGRQAIASHMHLKCKCHGLSGSCEVKTCWWSQPDFRAIGDFLKDKYDSASEMVVEKHRESRGWVETLRPRYTYFKVPTERDLVYYEDNFCEPNPETGSFGTRDRTCNVSSHGIDGCDLLCCGRGHNARAERRREKCRCVFHWCCYVSCQECTRVYDVHTCK

SEQ ID NO: 35 - DNA, 24157 bp, Mus musculus
  misc_feature (1)...(24157): n = A,T,C or G
cttttcctttcctgcttataagagacaggttgtcaaaccaagattcaaatccaaaattttctaacagcttctggcaagcatccaaacttctgatttatttaatctgagggcaaatttttgagaaaacaatctctatacaccaaatgtctcaagtagcctaaaagtttaccatgctgaatctttttgaagccatcatcagtccacacttagtcatatattttgtagccatctgcaaaaacgctattttctgcaaccaacaaaaataccatttatggaataaattatatatgttctaggagatgacttaactttcaataaagccttttctactaattttaagcacaatgtaggattgggaaattataaataaggtaacggtaagaagtgacctatattttgacttttatgaagtctctttttatactttgaccataatttgaccataactttaattttacctaaagtatcagaatccacaacttgaagttttttcttataactggagctgtgttctataatgagctccacagtttctgaacagggctaagagactgcccctttagttttttgccttacctgcttcttagtgagcagagtcccatccttatgggactttgatttacattcacttctccagtgcttttcacaacgctgggaaggacccaaaggaatgctcttcttgtctcctgagagatttttacaatctttcctcaggtgccctggttttttacaaccgaaacatgtaatttcacacgtagcgccgaatttcttccctttccttgctgtggcgtaagctaattcctgcattacggctggtgaggcatctacacatgctttaatataatctttcagggaacttgtcttatggattggtctgttcaggtcttggcacaaggtattcacgtattcccaagccaattgttttattaatatatcagtcccttccgaggggggaagcatcctagaaactgcctcttccaatctagccacaaaactctcgtaagattcatcatgcttttgtctaattcctgaagggactgtggatttagccccaggtggaggtaaactctgccagctagatacagctatctgactaattttctccaacactgcttttgaaattttcagttgtgctgctcgtttagcatagtctttttgcccaagaagcataggcactgtgggtttagttccatttctattttcctcatggaacttcctcatatccttacctactcgcttccaatattctaatgtcaagcttccctcctctagaaaccagggactgattttttgcacgaaattatgaaatttatccgaaacctttaggcttcttccagacaacatgtgcttaaacactgacagaaacaatcttttcccttttaacttttactgccccgtaataaaaaattactcgtctcttaacggatgtacagatcctctcatctgcagcacggtcacgacgagatcctatctttgcctgagaaaataaagaatagaaagaaaaaagaaagagaaaaaagactgatctgcccgggtgtccctgtttgaaggcaccaactgctgcagaccctctgggctaatgtttgtctgcgtgaaaagagtctctcgagcagatgggcaaagagtcagatggagtgacaaacagatacacacacacacaagagaggtgttggatctgaatgtaatgttccagtcgagcctcagacattttataatacagagtaacagaataaggcacgttgaagttttccaggtgcgagaggagtgacttcaaaaggaaccagataaatgtttactttagagattatcaccctgcttcagatcagccctgtgccaggcaagaaatttacacttcagtgttaatagcaccagggggttgttaactcttgacaggcttcaagaatgatgtagtgtcactgaccccgaaattctctaggccttgttaaattatatctagtctggagaatcctcattatcaggatagtatattcacttgctcttggcatggaatgtagcttgtggtaaaatttttatctcagtgaggatttttgtctcttcctgcagacaactgagttaatggctgtaatttattcttttattgtagtgcttaattagttactgaataggttaagctccttgctgctgtctggaattttggaacactgggaaaggctttagctatgtcagaatacaatcttaaaaggcatttacaataaggtaatactaaatagagagcacgtggatccatacactagactaactcgggaatgaaaaaattaattttatggtttatatagattagggagagagtgacagaccccaggaagggagtttccttgaaactctttgcttcatgaaccagcttcccagctttcgctttgtcaagctgactccaccagagtgccatggcaaacatgtggtcactcagatgcctgttgctgctgctaaataccttcttcaccataagggactcttatcccaccaggagccctgaccctcaaatacactcttccataatgctgttttccatcctggtgttttataactgcaacagaaaattaatgggatacatcctgtcttaaacaaaaggaaaaaaaataaagcaaaacaataacaaaagtcattcaaataaagcattttggaagcaaaactaggcaataaaactaaaactggaacaaagacttttttttttcaagacagggtttctctgtgtagccctggatgtcctggaactcactctgtagaccaagctggcctcgaactcagaaatcctcctgcctctgcctcccaagtgctgggattaaaggcatgcaccactactgcctgtcagaacaaagacttctaattacttcctattaagaacagaccagctgtttcaaaacggggcataggggacagtgttagatttggtcctgtgtcttctcacaagctgcttagtttctttacagcccttcccccttttcatatacaaggtctcttttcatcctagcttgacctggacactgaagatgaccttgaactcctgacctccttggctccacctcccaaatgcttagatgacaagcacgcactaccagtcctggtttatatggagctggggatgaacccagggtgtcttgcttgctaggcaagtactccagcaaaggagctgcatctctaggctctcaatagacttcttcaatctttctactcatgatctctttcactcaagtgcagttcttctttgcagaggaagatagtttattctggaaccatacaaaaatggcccaggatcacagatttaggttaccccaaattctgtgttccaatgtggcaacagtttgaggagctttttatagtacccatcaaagtaataaagcactttttcaaatacactagtggaaacatcaggttggcaggtcatagcagagcgggaaacctctgctataggcctcagatgtctgataatagccttatggttgggttctgcacagtgatgtaatgtttttataaagcctggttatgtggctattcattaataaccttttaggaaactcaggcgatgagactggcctatgagatcagttgtcttcccatgactgggaaaatgattcaggtccttcatgattcaggctactgaccatgagggagagatgcacctcattgtcctccggatttgctaatgtctagccatttatcaaagttgggactcactaagcatgctcaagactgggactgtccagccctatatgtgctgccaattgcaagcccccagtttaaatttcagtatcctctgagttagacttggggcagcatgaaggtttatacccagtcccttaaggttaccaagactgcacatctgacatctcagctgggaccaggctggacaagacatgtgtgcagaagatgtacttctccctgtgctggcatcaaaacacagagttcattcattcattcatccgtttgctcattcattcactttgagaatacactacataccacaagaatggagggggactccaaatcagataaaaccttgccaggacagctccagaaggggtttaactattgccaaggggcgctgctacacacactccagtgaagtctgtttggcagggcgagaggcctggaagcacttacgaggcagggagtttcaaggaaactcaacctcttggaaccagacattctcataacccatatactcataccctatccctgagttagtctggtgtatggatctatgtgttctcttttagcattatttattataagtgcctttaaagattgaattctgacatagctaagcctccaccagtgttccaatgtcctagaaacaccttgaagctgatgagcttggaattcagtagaaattcagtgaggttacctattcagtaacattcaaatttacttctaggagagacagtgaaactaattaggcattacaaagaactgagctagaatagctcaggctagtctgcagagtgattacttaggacagtagccagtctcacccaaacaagggaatacacaatggcctagctaataggtgagtttaccatgtaagagttagggaatcccactgagaccgggatcttctctacagccaggtatagcaggatacattgcatattagaagcaagtcggtgaatttttctgacaaatggagattcttcatagatacttaaaaatgcagccaagttaccttcatatacaagaatttaacaaggcctaggaaataggggggttgtggtattgcattattcatgagaaggtctgctagagcagaccccccctggtgctagctttcacaagactcaaaggaatagcacaaagtgtgactagggtgtgaaatccttacttgtcattagctgatcctaagcagagctgttttatctttactgtaaatattacctggttcctgtagatccttttgaagtcattcctttgttttgtgtcaggtaacttcaatgtactttgcctgccatgacatcctacccctttgttttctgtattatataagactagtgtacactttgtgacattacattcagattctacacaatctcttgtgttgcttctgtctgtcattcatttgcctactccttgtccacctgcaaccagagacctgttctacacagacagggaccaaaaaagggtctgcagcagggcgccaaagaggaagggatccagtgtggagagaaagggcaaagcatggactgagaggcagaaggggttactccagggctgcccatacccactcggctgcccaccacagaccctgagttcataagagaaaactaaagaagagctatgggagggaggagaccgactggggtaaagctctgctctgcctggggaacactactggctctctcacttcacctgggtcttcctcaggacaggggcctgcttggaagagctttgtgagtgaagtggctcatccagtgagaaagaagagacagccctgcctgggaacaccctaggagcgagcttagcagactgcagataagggttcctccaccctagagacaccctctgactgtgggagggacttaaggattttctgactgcactaatcttgtcctagtttgtgaactcggcaaggcacagtggaccaaactgaaaaagcaggtacaggaatgactaaggctgagttgagaaactcctcacggctaggaccagggcctgctaggatccacagatggatggttggccaactttcagtcatcctcatgagataacattctgtctgggaaggtcaaggggtttgtgagcaagaagtagtacaggttgtatcctgtctcagtcaatgttctattgctgtgaatagacaccatgcccactctttacaaaagaaagcacttaattggagcttgcttactgtgtcaggggtgttgtctattatcaccatagcgaggagcacggcaacacaggcaagcagacaggacgctggggaagtagcggagagtcctgcatctggacccacaggcaagcaggaagagagtgacactgggtctcgcttggacctttgatgcctcaaagctcacccctcagtgacacacttctttgaactgaaagaacctagtgggaaaacccccactcaatttctgttcagtgcacacccaagaatcacgaacagacgaccatcttgatgtaaaagcatgaggtagtttaatgacggagctccgggccgacacatatctcccacaggagacagaggtgtggaccacatggtggagccataatggcggagctccggttcaaaacgtatctcacacaggagacagtggtttcgaccatgaggcttggaagctaggggcttttatagaaaagggggtagggctgggggaggaattagcgaggttttacatgattggtctatttaaatatcaacagactgtcagaagggcgggagatagggaggcactaggccagtcaggacatgtaaggcctgggcatgtcctggcctgttctgctatgttctcagccccaggttttaaagctcacaaacaactctttgggctatttgacataaattacatgaatcacatgtctcaagttttatttcctttcagaacaaggctatgtctactctaacaaggtcacacctcttcgtccctctcaaggagcaccactcccctgataactaagcattcaaatatacgagcctatgggaacattcttattcaaactatcacacaccccaatgggtaaggcctgtccttaccctgaagaccatcctgtccctgaagacatactgtcctggtccctgtaactccctggggggcagccgaagtaggtgtttctatacatgaagagaggacagaaagttctacataagacaacctcagcaaacttcaccctcactgaacacatgtctagaatcccaccaaggtgggacaggctcagtagtaacagaactccagcccataataaagccattggcacaagcctaagtcacaccatggatgtcactgtcagcccatgacaagggaccagaaagagtagcacaattgagttggagatgtggttcttagcatgtatgaagccgtaggtttgatccttagtacgcatagccctggtatggcggtgcacagcgccaatctgtactcagaagcagaggcaggaggtaggaggattagatgttcatccttagctactcagtaagttctagaccaccctgggctccatcagaccctggtttgtttgtttgtttgaatttcttgttaccattgctctggaagggtagatgtttcaaacccaagaagacagatgccggtggatggattctgaactgtttcccaacagcatccgaagggtggttatagaaacatattcagaaatagaaaacagtgggggtgggggcttccgcaggggcctgtggtgtacctgttcaagcggcactaggatctgaacatctagtcaggtcacaaggtctgtgaggtctggactgaggcagaggtcactggccacgcaagtaagatctgagtcctttgttacagaggctacagagagacaataggaagattcccacacatgacttggatggcctaggaatgaatgagtgaacaggaagtgctgagccaccagtggagtgggatcacagatttgtgaagagagacagcacctgtccctctcatgtggtgtcacaagtggactgactaaattaaggaattgaaggatagaccaagagttcagcacatgagatcaatctgnnnnnnnnnnnnnnnnnnnnnnnnnnnnnnnnnnnnnnnnnnnnnnnnnnnnnnnnnnnnnnnnnnnnnnnnnnnnnnnnnnnnnnnnnnnnnnnnnnnnnnnnnnnnnnnnnnnnnnnnnnnnnnnnnnnnnnnnnnnnnnnnnnnnnnnnnnnnnnnnnnnnnnnnnnnnnnnnnnnnnnnnnnnnnnnnnnnnnnnnnnnnnnnnnnnnnnnnnnnnnnnnnnnnnnnnnnnnnnnnnnnnnnnnnnnnnnnnnnnnnnnnnnnnnnnnnnnnnnnnnnnnnnnnnnnnnnnnnnnnnnnnnnnnnnnnnnnnnnnnnnnnnnnnnnnnnnnnnnnnnnnnnnnnnnnnnnnnnnnnnnnnnnnnnnnnnnnnnnnnnnnnnnnnnnnnnnnnnnnnnnnnnnnnnnnnnnnnnnnnnnnnnnnnnnnnnnnnnnnnnnnnnnnnnnnnnnnnnnnnnnnnnnnnnnnnnnnnnnnnnnnnnnnnnnnnnnnnnnnnnnnnnnnnnnnnnnnnnnnnnnnnnnnnnnnnnnnnnnnnnnnnnnnnnnnnnnnnnnnnnnnnnnnnnnnnnnnnnnnnnnnnnnnnnnnnnnnnnnnnnnnnnnnnnnnnnnnnnnnnnnnnnnnnnnnnnnnnnnnnnnnnnnnnnnnnnnnnnnnnnnnnnnnnnnnnnnnnnnnnnnnnnnnnnnnnnnnnnnnnnnnnnnnnnnnnnnnnnnnnnnnnnnnnnnnnnnnnnnnnnnnnnnnnnnnnnnnnnnnnnnnnnnnnnnnnnnnnnnnnnnnnnnnnnnnnnnnnnnnnnnnnnnnnnnnnnnnnnnnnnnnnnnnnnnnnnnnnnnnnnnnnnnnnnnnnnnnnnnnnnnnnnnnnnnnnnnnnnnnnnnnnnnnnnnnnnnnnnnnnnnnnnnnnnnnnnnnnnnnnnnnnnnnnnnnnnnnnnnnnnnnnnnnnnnnnnnnnnnnnnnnnnnnnnnnnnnnnnnnnnnnnnnnnnnnnnnnnnnnnnnnnnnnnnnnnnnnnnnnnnnnnnnnnnnnnnnnnnnnnnnnnnnnnnnnnnnnnnnnnnnnnnnnnnnnnnnnnnnnnnnnnnaggagaggagaaatagaggctggccataagcatgtggagagggggaagggaatgggaagagaaggggaatgagtgagaggacagaggggtagcaagagggctagagagagcagaagcgatggcaagaagccccttttatagtgagtcgggcataactggctgttgccaggtaactgtggggtggagcctagacaaaacactaacagccatgctgtagcctggacacctgaggacccacactgagtcttgctgtcagctcttgaggaatgagcaccaaaagcatgtgtgtccccaacccttatctgtatgggatgatcctgggcatggctggagctgaggagaactctgaaaacacacaacaacaagctgtttcttcgcatcactagcagcaaacacggactatgctcccagttcccctccaccaacagctagcttccagctacagggcaacttggcctcggccccaccctggccaacccacccaagcagcttcacaactttttctgtctcctccctacccccaatcctaggaccagcccctgtcaccaccatcaactccttagactgtgaggaagatcaggtgcaaagcccctatttccacatgtgagaccaagaatggaagtgtgactctcagaaaagcaggtggaggaaactcagcagcccacaatcccctgagtagggctgtgctggaggatgatgggggtgaggagggaagggaaggagaaggaacaaacaggactgccaggcaaagggagcctgatgccctgatctcccccagaagaatcacccagaagcaggacgtgggtcccagggttctgctagagggataacactcagcaggtggtcgttaatatttgttaggtgtggaagcacttcctgagcggtaggaatagaatactggaggacgcttaggtaaaagcagaagggttggagatttccttgtaaaaactggggcttcagcacttaagatgagaaccaaaaccggatgcctgggctggatcctctgttcatactcaaggagcggagtgtaggaggcagcccggcacctagaggaagtgggaagtgagaaacagatctgttcaaaccagtgctgcaatgacctccttcccgaggaatttctgtcctgccgcctcatccccaaaagagggatggcccagacgggctcagcccagagggacctgacaacctgaagggcgggtgatgaggcatccttggtccaggacttcctcagccttacagcagcagagattcccatgagcgtttcaggatgcagtctgtcccctcactccttccggaagcaagctaagcctgcgcacaggtcttagtatcggtgattgccagaagccctggcctttccaccctccctaggtctgtcctgaaaggtaaggtagacatgctacaccagaagccacgccagggctctgatgccacattgtgtgcggtggggcacttagggcggtctcagccaggcttctgggtaccaccggggaccgccgccgtgggcgcatagcttgggacccctgtcgtagtctcagaggagcagttgtgcagccaagccaagggcacagccggagttgccagaggccagcagccagggtcgttctccccaccagccagagacccgcccacagcccatgaaacgccccgcctgcagcccgcccccgccatctgtgctccgctccgcctgcttgggtgcattcagcctttggtgatcctccaggacctaaggtttcggtattatcttcggggcctcttcacccggaggtgagtctgctgagcccgacctcaggtgttcactcgtcacgcgagggcctggccacggcggggaagcactgggagagagcgggaggccttgaccgcagcgtgtaggatctggggtcccggcgctctgctcccgggtgcagagtggttggagcatgcgaggccctctgcagcgtgctctgttcctaccatcaccccacccccaccccagtccttcctgcacgtttctggagaggcaaaggcccctgctgagccttcactgggtacccctatctcgactccacttgtctgcttgggatctccaaagggggatacaccctcgtaaactagagcaggaggctggggggtgggggtaggggtagggtctgaccagttagattgaggctggaccctccccagagtgaggagcgggaagctctttgtcttatccaggattttgcatatcaatgctgaggttctggtgattaagtagggtccctggctagcgggggtaacctgaacaaccttcctccgctggccgctagccaatagacacctggcttccgcggatgagccctttgagtttgtggaggtgttcctcaggtccccagggccctgccccgttgcctgcagatgtgtggacagacaaaacattggactcgttttccaaccacttcaccccttccttcgctagtcctccggtggacgatgggatgcctcattgacttgtttgtggctgtgcatgccagagcttcctagcagacagctcagggctccatcgttcctaaatcccactgtgtaacgaaaaaaaaaaaaacaaaaacaacaacaacaacaacaacaaaaacaaaaccagaaatgaggacaggcccagctgggcttggcactgaacttggccacctggagctttggctacccactacaagatgtcagcaagtctcaggatagaagaggcctaaggccagtcctggaagataccaaaacttcacctcctctataccccgttcctctaggagaactgtaagccacctttgtctctgggacgcccctctcccactcaacagatggcaccagtcatcttcctcctcaagaggccagtggtattcaaaataggatattgaaaccaagcaagctggtcctctcctctaccctatgccaaagacttctgcccaaagggcccagaaaagtcccatagccatctggctggctagtgtgctgactgctacaggtgtcagtgtccccagcgagcaggtagtggagtggaggtgtcttcttgtggaaatgggtcctgagcctctaccttgtacagaaaggaattagtgaagcccagaggcctccagcccgtgtctctgccacaagagagagggggtgggggtggggctgtatttggttcccagggctcagggaaggttttcggttcatgcatgctcatttatctgaccactgtcttaaccccaggacaaccacttaactgtccacttccatatcagagttcttggttcccctttacttcgtctatggagcccctgagtttgggaaggggtattaactgaaaggtaccattagatgaacttggagaaagatttgtaggtgccacgggagatttcaggtaaaagctcttttaataattggctacaatagcagcaggaggaggccaggaattctgaggtagagatttgattagcagcacgtggagcaaaggagacttctgactcctacaggtttcagaaagtggggagaggctctcagatgaatggcttggactgtgaggtaagtgttagtgtagcacgagactagcttaaggctgtacaaattgtccgtctgattggtgcattgggccaggtagacactagataagcaattgggccttaactcgagttgtcttaatggctacccccagggcagcagggagtcaatactgctctcctgtctggggcctgaatgctgaaaccatctacaaaggggacataaggcatattggggaggtgtagagtgggccaggcccagggtctgctggtatctatgccaggatcctgagtggtggtggcgtagcctgtcttttaaccaactgcctctctcacagtaggcttctttggcttgcgaaccttcagcagatgtctgccacttccaacatgagagtcttcctgcctgtgctgttggcagcccttctgggcatggagcaaggtatggagctctgagataaccctgcagcctggtcctcctcctgatctctcattctttctcctgagtagatgcccagggctcctcctgagccagccctcctaggaacgtctggccttcccacctcctactctctagccaactgacctagttcccctgatgctgtgctggcccagctacacctttgtcacctcgtgttgactttagccactccagtaccaaagtctgaagtcagttgtcattggctggcttttttccctgacccagggctgagcatgctgttgcttcttgtcagtgggttggggatcaagggccccactggaaagtcaccttaccctggaaggcttccccaggcaataggcaggtgtcacctacagcattgtcccttttgcagttcattccctgatgtgcttctcatgtaccgatcagaagaacaatataaactgcctgtggccagtttcatgccaggagaaagaccattactgtatcacgttatctgccgctgcgggctttggtgagtagctgcctgtttccctagccagggccagggacctgcggggctttccccatttcctgctaccctgtctgtctgtcccctcatcctcactttccatgcagggaatgtcaaccttggctacaccctgaacaagggctgctccccgatctgccccagtgaaaatgtcaatctcaatctcggtgtggcgtccgtgaacagctactgctgccaaagctccttctgcaacttcagcgcagctggcctcggacttcgtgccagtatcccactactgggccttggactcctgcttagcttgttggctctgctgcagctgagcccctgaccatcccccatgtgttctccatatccccccagctcaggaaaagcccagctccttttaggtcccaggggaccctaggaaccttcagctcctcctgggtgtgtctagttccccctccacactctctcaacgtcagggctaagtaccaaactcacccatacctgctctgttgaagtggtactggctacccttgcttccagagccaatcctataacctcccttggggaaccagcgaaggggtgaagatctccttggagtctcaagagtaccagagtcagcgccgaatcttgtggacacactgacaaggatgtctaatccaaatagatgtatatctgtgtgctcagtgtatccctgtgtgaatgaagccacttggattctggggtgggcaaagaagacctgaaaagattctacagcagaaggcctgtgtcgccaccaaaacccctccccctggtatcattgtacccaccttgtactctgttcaggaggctgcccatggaggactgccacccctccagatgaaggctcccactacccgatgcagttgagtcccatcctgccctctctgcccacactggcttcctgctgctattctagtgcctcaaataaaccgttcacaccctttcctgctatgtcctggttgtccttaacccgtcttccccctccggtccaaagggacctggggatcctgcaggcccacagccctgcttaagcgattctgaaagaccaaccccgatacagtgatacattcctatgatgccatcatagcagaagcagaggtctctgggaggccagcctggtgcatagcaaatcccaggaatctaggcccatttagtgagacaggcctgagagaaaagagagagagcaaaggcagagagaacttgaaagtgtgctgtctcaggctgaaagctgagaagtacagctacccataaaggcaggcccatcaggctggtcacacattcccaagctttgtctgccccagagacttcagaggcctgctgttgccacttgtccttcataaactaccctgtagtctaagccatgggagtctggcccaggcaagtgatacttgtccaccctataactggctttgctttgctttctggtattttaagacggtctcgctatgttaagactagctgccccaaacccagagcaatcctctttgagtgctggaattaaaggcatgcaccaccacacctggcccttagacttttttgtttctgaggcaggatctcacttgaacgttaggtactggcattacaggcagatgctactacacctggcttcctggggttcagtgctgtgagtattatggacactgatggagaagctcctgagtctgggtgcctaaggaagctatttctcagctgttcctaagcttctgggctgttgggtgataccataatgggataagatccacacagatcctggctgtggtgatatccgtgtctgaggaatactgcccagtgggggtcagacacagggacaacacaggggctcagggtgaatttctaaaatctatgtaggcattggctttgtgccatgattctcaagaccagggttcccatgacgtatagcctgagggtacaagaaggaattagcctcataccaggtagctcagctacctgaaaaggacaaactttggggaaatgtcaccgggacagcacctgagactcagaaagtatgctttgttcctagaatattgaaaggccaaatggagaaaggtgggagccaaatcttctgcaaggagcttgggctgcctcagtgtagacagtatccactgtggtgttcaggacagatctgagtaaggtttctagagactggcttgtctgtggtcccagcagatctaaccaccaaaagcagtatgagggaagacacctgggttagactcccgggacatgggaaccagaagggcaccaggcagtgacagggacacgtaacaagctctggttttctccctatcttgatttagcttccatattgtgatggagtggtgtcacaaggctcaagagttgaggccacacgtgatctgggatcctctgctctagtctggagggcgtgatggtttcaaggctaaaaactgggacagtgagtggtctgctctgattcctctcaggagaagaatgggcagaaggggcttgagttccaggaatgacctgaggagaagggagggtgaggattggaaagaggagggagaactggaagcaggggagggaggggccaggggccaagtttcacttcccgaaagcagaatcgaaagtatcccagagttaagtttcaatttcatgaagcttggaggtaggaagggtgtggaaagagggaggaagggtgaatggggagggaagggtgcacactgcacctctaagaaggctgtccaggtttggagccaccagcctcactcataccagattcgaatgctagatctgatcccacatgatccaatatgtctctgatttgttctgggcccattctacctccagaccctggccagctttcctattattgctgctagttagtgatcagtgaccagtgaccagggcttccccagtctgatcctgctagcctgccccaaccagcaagtgcttagctacctcccttctgtcccaagggctccagtgacagactagagattgaggactgcaacctcaggtggacgcctctccacctgagcatcatccaaccaactaagtatcctcaggcaagatcaaagcaaaagatgagagaaatttccctactagggctccctctaataaacagagcatatgcaggaaaagcctactctgtaccaaagtataaaaggcaggggcgatgtaaaggtctcgtaaaggggtctatacttcatggtggatgctttgggggctctgtccccagctcagtagcccactctcattcctgggagtctgttgcttgtctaaactctatctttaattctaaccatctggttccaatcttttgttctgagacataggagtctagagtgcactaatgcaagaggtgttttgtttgtttgtttgtttgtttgtttgtttactactttaaaaaattgaatcttatttttttattttaataaactttattatttaaaaaagcgtgcagatcaggggctggaaagatggctcagcagttaagagcactggctgctctcccagaggacccaggttccatgtcctgcacccacatggtggctcacaactgtctgtaatgccagtttacagggatacccatcctcttctatcctctaggggcactgcatgcatgtgatacacagacagacagacaggtagacagacagacagacaggcaaaccacttagacacataaaattaaaatctttttttttaaagctttcaaacaaaaccacgatacatcaaacattaaccagacccaaagcctagacgacgtaatgaacttacatgcagttagaactggcatttgaaatggaagccgtgaagctcagcattaaatttacacttccagtaccaaacattctatgcattgttagttagggttaccgttgctgtgatgaaacaccatcaccaaaagcaatatggggaagagagggcttatttgacttatacttccacatcatagtgcatcactgaaggaagtcaggcgaggcaggaacctggaggcaggagctgatgcagaggccatggaggagtgctgcttactggcttgcccctcatggcttgttcagcctgcttgctttcttcctcctcctcctcctcctcctcctcctcctcctcctcctcctcgtccttttttttttgagacagggtttctctgtatagccctggctgtcctggaactcactctgtagaccaggctggcctcgaactcagaaatctgcctgcctctgcctcccaagtgctgggattaaaggtgtgcaccatcactgcccggctcaatctgctttcttaaaggacccacgaccgactgcctgcccagggatggccccacctgcaatggcctgggccttcccccgtcaatcagcaagaaaatgctcttcggggcttgcctacagcgtgaacgtaggaaggcattttcttaattgaggtttcctcttcatggatgacttagcatgtgtcacgttgacgtaagactatccagcccacaccctgacccacttttctttaactccttcctccccttgcccatgatctcttattttggagacctgcaggtgctcaagcttgctttccctgacgctgtggctgtttctctgaccactatgcctaactttaaaggtgttaaaattgcagcgctgggtgtggtggtgcatgcctttaatcccagcacttgggaggcagaggcaggcagatttctgagttcgaggccagcctggcctacagagtgagttccaggacagccagggctatacagagtaaccctgtctcagaaaaaaaaaaaaaaagattgcagcaagtgcctggacaagcagagtttggccacccagccgcagaaaagagccaatgcaaccacattggcaagagagactaagatccagtggccagacctcattaaactcatccttagggccttaacatgggggtaaggtttaaacaggagactgatagcaagggtgaggcagtccagccaaggtgtgccccccccccaccgcggtctcagttctcaagtctacagtgtctcacaagttataaatctttctccaggggacatgttcttcctcctgtttccccagcctttggctcttccagcaggaagtatctgaggaaattccagtttctggggatcctttatttcagtaatctgctagcccgagagaggaacgcagataaatttctcccagggaggcaggttccaaaggactgatttgccagtccagtcaagtcttccccttgatccttaactaaattaagttgtccttgcgatcttcttgctttccttctcagtctggtccaccccctatacacacctgccccagtgatgaactctaagggtccttagcctgcttcatcaggcctcatggccacagcacctcagcttccagaggccctaggtccctctccctctctttccattctgacaagccctttcctgcaacacgtttcatgtcaactggagcaccccaggcagctttgaggcctcaggtgactggctgactggcacacagtcccattaggaaaggctgcctgattgctggagggcctctcggcatactcagaactccgaggaccacggctatagcccagacctctggagaaatttagaagatggaatgctggtctgtgtaccggggcatagccagtggggaatccttagcccagctggcaggagtgattggtcttacagggcatgaccagaatgaccaaagtgctatagctctccaaggggaagccagagtaagacaggctgcccctgaggtggtggcaggtggcgagaagcagagggcagctaggagcccaagtcggggccactgagcaggaagtggctgtggtcacgcgcatgcataccatacaccacttgttggggatctggggatctaggtccagcaaagaaagcttcaggaggaaaaactcttccatgaagtgttacagctcaataaagcaggcatcctcagtcaatctttggtgaaaatcactcaggcactttattccttgtggactaggaccttataaacattttgggatggggtgagtaagtgcttcctattggcttggtttgggattctctatctgcatggggaaggacttcaggtgttgactgtacatgcctgattttcatggtcctcctagtggggtgtctcagtcacgtgctccaggacaggaatctggttgggagctagtttgaactcctgccattctcaatgatgaattttatggaagttctgaacttgctacaaccttaccagctcttctatctggtggcatggcccactgcccccacaactcctccttttcctttttataaaggagaggtatcattggagtgactgtctcctgtgttggggacagtttggtattgaaccaaaacctgattggtagttatttttgcaatgctactaatctgctgctttagaaattggatgagacagggtgccaagagaagcaaggctccaagctcatacagggccaaggaggagcagaagccaagctaccaaggggttagagagccatggggcaggggtgttgggagcacagcatgcccagcgatccccctggagctctttgggcatttgcacatcttgttctaccagcccagattcactgacatagaagcaacattcctcttctagcaaaacacaagtccctccctgttcagcaggtagtaagcccaaggccctccagttttggagaacaactcctgccaaggaggttgtctggcattgaagggactcaagcgtgtctgcagtggaggccattgcctggtcaagtttggtctggaagtcgatggccagatgctgtgtttggaccagggctgctctaccagctcctgtcatgcctaatgagacaaggaaacccagtgcagcaagcagagggatgaagatatctctctctctctctctctctctctctctctctctctctctctctctctctcttcctcccatctgcaaggcaagttcttcaggttcatagagataaatctgggaaacaattattataggagttgcaggagccttgaaaaggggtggggcggggggcagtgttaatgcaggagcctgtagtgctttgcaccagagaagtgcagggggttgatgtatgttgatttggtgatggtgttgtaacaggcacatataagatggggtttttgaggagggtcctacaaggcaaaagggggaagaaatgccccacctttaggttgaagagaggaatatcctgtgctttccttgtgggtaagggtctatgggttttatgggaacagctgctaatagcagtcaggagagagaagcacagaaaaaagaggagtttttgggaggagttggggtgggtcattaaaggaaggaggtcagctgtatattggatttactgtagccaggaatgggtagcttggagttccttctgagactgattttcccattgaagaatattaacatgcataaagattgatttggaggtgggaagggggagttcacgagaggcatgtaagttggctatggggtatttggcatagccattatggtagagtttacccatgactcctgttcgacaacattcatcccacagatggctgatggaaagctgaaaatgagttttaggttggtgagcatggtgccactgtggctggttggtttccactctgcagctccaatacctcctggagacattcacctgtgtttcagtaaggaaagcagaggaaagggctgtgtatagtggagatgccatctgggtgtagggagatctcagtcctggtccaacatgcttcaagtgggcaattctgggaccctatgatttttgagtgtgtatctgttgtaggtctccctagagaagaatctttgatggtaagtgttgggaaggctagagagaggctggacattagcggagttagtatgaagaatgacaaaggagaggtgtccccttcctccaggcttgagtaggctaaatagaccttaagtgcttgccacagttggaccttaaagacccaggtggaatcttccatctagcccatttgcaatttcttacaggaacagactgcccgctgagcttactttgcaacttaatctagctgaaacaaaggatggggtctgtggattttccctatataaacacagagctgaatattaaattttgagccttgatcagaaactttgtcttggcttcatccttctcttgcaccctatcctttatcatttctagcctccctttcaagtagacccagttctccatggctgaaggacagctacagagaagggaggttgtgtaaggcacatgcctgggcagcagtcaccaggtcatgaatgtctttccaggagatcttgttcttttgggcatggcatctcctctgcctcctcctccacctcctctgtccttgatctgccagtaagaggcaggctatcttcttggttggtgtttgacatttctggcaggaacccagataggaataggctgatactgtgggaaaacacaaacgaaatccttctcagttgtaaggagtctggtcctttccaaatcccatccaaaggatcatgacatcgtactaagatgggggtgggggtgggggtaggggtggttaattttggtgtgtgccaatggagggaaataggagaatgcttagagtttttgtagatgttaaatatgcttggtgtagtcataactattgttaattgtacatgggggtaggtggttggcttttgttttagaagttgagcttttaggatttgatgtattctttctactatcccttggccctgagggttgtggggaatccccgtatggtgggcagtttcccattgtgtgcagaaagttttgaactgagaaccagtgaagacagggccattattagtttcttttatctgttgaggaatgccctctgaagctaagttcaccaagagctgacaaaaaaaggctctgtcaaaatcaaagacaccccaaattttcctctatcaccccatcctatcagttctgatcaagaagtagggtcgccctggaggagagctccaagataaagtttctgacagctttattttaccaaagtccagtctcccaacccaacctccatcccagagaacagggtgttaaagaagggacttccttgacattccttggcacttctgaaggactgcccctcttgtgaaccctgtcctctaaccccaagtctctgaagactgttgatgaaaagggaacgctgttgtgcggatagatgtggtgtaggaaaacagctatggagactccaactcctgggcaggtttgcccggatgtctaagtagggaggacagaggctccagtgggggccaggagttccagccagaactcagcacctgactgtgaggtggggcctgacccctctatgtggaccagaagttctccctggggtaccttccaacctcccagcctctggccagctgtgctatttccagcccccagcctccaccctcagaggggagtggtctgggaatgtcacggagatgacatatacacttcatcccaggcctggacagaggccagagagccctaagaggctctattagagcccctgctcccttcacttccgaaggtccccatagtcctctccctcctctaaacttcaggaaatcgaaactcaaattctccgcctctccacctcttcccaaaagtcaggaaactgaaagctagctcccgaccacctctgccaatttactttctcttctctctcccaggtatcttacagcctgtctgaagcctgtggtgccctgcccatggtgagtcctaagtaggacccagaatctaagcaggaaagtggaatgggagttctgcccagtgaaagctccctttgaagtagctctggctccccaaacacacaagtcagactaaatcttccctggagcgctcaatgcccgtattacccccaagcgcccctggaaactcctatgggttggacgggaagggtcgggcatcctcctctcgcccccagggagggacagtgttgttagtgagtgtaatagctctcagcgtgtgcttgctatggggagattccattgacttgaaagttgaaatgcgctcttactgctttgacagcttctgccactaggggcgcgtgtggccaagcctggagcccgggtttgaaagcaccaccctcctgggatagggttagtcggcttctgtccggcaagctgtgcctgccggtgaattaaaggggcaagggtggccacggtggcacatccagctcccgtgctaaccatcagcttaaagtcattagatgaaaatgagaacacagccacatgccacaattgagtgtcccctgccctagagcaaactcccttcagccctcacccatagggcctttccatctgctgggcagatgactaaggatcttggtctaataattccatcttccattgatgagtctgcggttccatcttatggcttgagtgttggaacatctctcgtggaggagaaatgcacgggcgctaggctatgttccttcctcacagctgccttccagggtgtcggggtaccaggctcctgggaccccaacacatcactcaggggaggtgaaatgcagtctaaaataggggtcccaacccatgtttctccaggtgagaaatggcaggggctaggacagtggctgtggttctcaaactcctgggcacccagatgccgccgagaacggcattgagaatggggttcccatacttctgtgtatcccaaggccgctgaggactgcaagcagttgggagaacaagggccgagggcctgtgatgagggcgtgtgggggctccaacttaactcaggtgagtgccaggagtgtgcaggggccttctacccgagacttaggtgcagctctgtatgatgaaggcttccccccatagtggtccttgatgaaggagacagcccttgcttgtccaaactgtttattcatggcacatgaagactcatgtgatttactcagggtgaaccagagattaaataccttttgcagaaagggacgcttaggaagaatgctcattggctaaacactccga

SEQ ID NO: 36 - DNA, 995 bp, Mus musculus
gcagcagagattcccatgagcgtttcaggatgcagtctgtcccctcactccttccggaagcaagctaagcctgcgcacaggtcttagtatcggtgattgccagaagccctggcctttccaccctccctaggtctgtcctgaaagtaggcttctttggcttgcgaaccttcagcagatgtctgccacttccaacatgagagtcttcctgcctgtgctgttggcagcccttctgggcatggagcaagttcattccctgatgtgcttctcatgtaccgatcagaagaacaatataaactgcctgtggccagtttcatgccaggagaaagaccattactgtatcacgttatctgccgctgcgggctttgggaatgtcaaccttggctacaccctgaacaagggctgctccccgatctgccccagtgaaaatgtcaatctcaatctcggtgtggcgtccgtgaacagctactgctgccaaagctccttctgcaacttcagcgcagctggcctcggacttcgtgccagtatcccactactgggccttggactcctgcttagcttgttggctctgctgcagctgagcccctgaccatcccccatgtgttctccatatccccccagctcaggaaaagcccagctccttttaggtcccaggggaccctaggaaccttcagctcctcctgggtgtgtctagttccccctccacactctctcaacgtcagggctaagtaccaaactcacccatacctgctctgttgaagtggtactggctacccttgcttccagagccaatcctataacctcccttggggaaccagcgaaggggtgaagatctccttggagtctcaagagtaccagagtcagcgccgaatcttgtggacacactgacaaggatgtctaatccaaatagatgtatatctgtgtgctcagtgtatccctgtgtgaatgaagccacttggattctggggtgggcaaagaagacctgaaaagattctaca

SEQ ID NO: 37 - protein, 136 aa, Mus musculus
MSATSNMRVFLPVLLAALLGMEQVHSLMCFSCTDQKNNINCLWPVSCQEKDHYCITLSAAAGFGNVNLGYTLNKGCSPICPSENVNLNLGVASVNSYCCQSSFCNFSAAGLGLRASIPLLGLGLLLSLLALLQLSP

SEQ ID NO: 38 - DNA, 1344 bp, Mus musculus
tcccatgagcgtttcaggatgcagtctgtcccctcactccttccggaagcaagctaagcctgcgcacaggtcttagtatcggtgattgccagaagccctggcctttccaccctccctaggtctgtcctgaaagccagagacccgcccacagcccatgaaacgccccgcctgcagcccgcccccgccatctgtgctccgctccgcctgcttgggtgcattcagcctttggtgatcctccaggacctaaggtttcggtattatcttcggggcctcttcacccggagtaggcttctttggcttgcgaaccttcagcagatgtctgccacttccaacatgagagtcttcctgcctgtgctgttggcagcccttctgggcatggagcaagttcattccctgatgtgcttctcatgtaccgatcagaagaacaatataaactgcctgtggccagtttcatgccaggagaaagaccattactgtatcacgttatctgccgctgcgggctttgggaatgtcaaccttggctacaccctgaacaagggctgctccccgatctgccccagtgaaaatgtcaatctcaatctcggtgtggcgtccgtgaacagctactgctgccaaagctccttctgcaacttcagcgcagctggcctcggacttcgtgccagtatcccactactgggccttggactcctgcttagcttgttggctctgctgcagctgagcccctgaccatcccccatgtgttctccatatccccccagctcaggaaaagcccagctccttttaggtcccaggggaccctaggaaccttcagctcctcctgggtgtgtctagttccccctccacactctctcaacgtcagggctaagtaccaaactcacccatacctgctctgttgaagtggtactggctacccttgcttccagagccaatcctataacctcccttggggaaccagcgaaggggtgaagatctccttggagtctcaagagtaccagagtcagcgccgaatcttgtggacacactgacaaggatgtctaatccaaatagatgtatatctgtgtgctcagtgtatccctgtgtgaatgaagccacttggattctggggtgggcaaagaagacctgaaaagattctacagcagaaggcctgtgtcgccaccaaaacccctccccctggtatcattgtacccaccttgtactctgttcaggaggctgcccatggaggactgccacccctccagatgaaggctcccactacccgatgcagttgagtcccatcctgccctctctgcccacactggcttcctgctgctattctagtgcctcaaataaaccgttcacaccctt

SEQ ID NO: 39 - protein, 136 aa, Mus musculus; identical to SEQ ID NO: 37

SEQ ID NO: 40 - DNA, 1356 bp, Mus musculus
ccttccggaagcaagctaagcctgcgcacaggtcttagtatcggtgattgccagaagccctggcctttccaccctccctaggtctgtcctgaaagccagagacccgcccacagcccatgaaacgccccgcctgcagcccgcccccgccatctgtgctccgctccgcctgcttgggtgcattcagcctttggtgatcctccaggacctaaggtttcggtattatcttcggggcctcttcacccggaggtttcagaaagtggggagaggctctcagatgaatggcttggactgtgagtaggcttctttggcttgcgaaccttcagcagatgtctgccacttccaacatgagagtcttcctgcctgtgctgttggcagcccttctgggcatggagcaagttcattccctgatgtgcttctcatgtaccgatcagaagaacaatataaactgcctgtggccagtttcatgccaggagaaagaccattactgtatcacgttatctgccgctgcgggctttggggaatgtcaaccttggctacaccctgaacaagggctgctccccgatctgccccagtgaaaatgtcaatctcaatctcggtgtggcgtccgtgaacagctactgctgccaaagctccttctgcaacttcagcgcagctggcctcggacttcgtgccagtatcccactactgggccttggactcctgcttagcttgttggctctgctgcagctgagcccctgaccatcccccatgtgttctccatatccccccagctcaggaaaagcccagctccttttaggtcccaggggaccctaggaaccttcagctcctcctgggtgtgtctagttccccctccacactctctcaacgtcagggctaagtaccaaactcacccatacctgctctgttgaagtggtactggctacccttgcttccagagccaatcctataacctcccttggggaaccagcgaaggggtgaagatctccttggagtctcaagagtaccagagtcagcgccgaatcttgtggacacactgacaaggatgtctaatccaaatagatgtatatctgtgtgctcagtgtatccctgtgtgaatgaagccacttggattctggggtgggcaaagaagacctgaaaagattctacagcagaaggcctgtgtcgccaccaaaacccctccccctggtatcattgtacccaccttgtactctgttcaggaggctgcccatggaggactgccacccctccagatgaaggctcccactacccgatgcagttgagtcccatcctgccctctctgcccacactggcttcctgctgctattctagtgcctcaaataaaccgttcacaccctt

SEQ ID NO: 41 - protein, 98 aa, Mus musculus
MAWTVSRLLWLANLQQMSATSNMRVFLPVLLAALLGMEQVHSLMCFSCTDQKNNINCLWPVSCQEKDHYCITLSAAAGFGECQPWLHPEQGLLPDLPQ

SEQ ID NO: 42 - DNA, 1442 bp, Mus musculus
cttacagcagcagagattcccatgagcgtttcaggatgcagtctgtcccctcactccttccggaagcaagctaagcctgcgcacaggtcttagtatcggtgattgccagaagccctggcctttccaccctccctaggtctgtcctgaaagtctcagaggagcagttgtgcagccaagccaagggcacagccggagttgccagaggccagcagccagggtcgttctccccaccagccagagacccgcccacagcccatgaaacgccccgcctgcagcccgcccccgccatctgtgctccgctccgcctgcttgggtgcattcagcctttggtgatcctccaggacctaaggtttcggtattatcttcggggcctcttcacccggaggcttctttggcttgcgaaccttcagcagatgtctgccacttccaacatgagagtcttcctgcctgtgctgttggcagcccttctgggcatggagcaagttcattccctgatgtgcttctcatgtaccgatcagaagaacaatataaactgcctgtggccagtttcatgccaggagaaagaccattactgtatcacgttatctgccgctgcgggctttgggaatgtcaaccttggctacaccctgaacaagggctgctccccgatctgccccagtgaaaatgtcaatctcaatctcggtgtggcgtccgtgaacagctactgctgccaaagctccttctgcaacttcagcgcagctggcctcggacttcgtgccagtatcccactactgggccttggactcctgcttagcttgttggctctgctgcagctgagcccctgaccatcccccatgtgttctccatatccccccagctcaggaaaagcccagctccttttaggtcccaggggaccctaggaaccttcagctcctcctgggtgtgtctagttccccctccacactctctcaacgtcagggctaagtaccaaactcacccatacctgctctgttgaagtggtactggctacccttgcttccagagccaatcctataacctcccttggggaaccagcgaaggggtgaagatctccttggagtctcaagagtaccagagtcagcgccgaatcttgtggacacactgacaaggatgtctaatccaaatagatgtatatctgtgtgctcagtgtatccctgtgtgaatgaagccacttggattctggggtgggcaaagaagacctgaaaagattctacagcagaaggcctgtgtcgccaccaaaacccctccccctggtatcattgtacccaccttgtactctgttcaggaggctgcccatggaggactgccacccctccagatgaaggctcccactacccgatgcagttgagtcccatcctgccctctctgcccacactggcttcctgctgctattctagtgcctcaaataaaccgttcacaccctt

SEQ ID NO: 43 - protein, 136 aa, Mus musculus; identical to SEQ ID NO: 37

SEQ ID NO: 44 - DNA, 1456 bp, Mus musculus
acttcctcagccttacagcagcagagattcccatgagcgtttcaggatgcagtctgtcccctcactccttccggaagcaagctaagcctgcgcacaggtcttagtatcggtgattgccagaagccctggcctttccaccctccctaggtctgtcctgaaagtctcagaggagcagttgtgcagccaagccaagggcacagccggagttgccagaggccagcagccagggtcgttctccccaccagccagagacccgcccacagcccatgaaacgccccgcctgcagcccgcccccgccatctgtgctccgctccgcctgcttgggtgcattcagcctttggtgatcctccaggacctaaggtttcggtattatcttcggggcctcttcacccggagtaggcttctttggcttgcgaaccttcagcagatgtctgccacttccaacatgagagtcttcctgcctgtgctgttggcagcccttctgggcatggagcaagttcattccctgatgtgcttctcatgtaccgatcagaagaacaatataaactgcctgtggccagtttcatgccaggagaaagaccattactgtatcacgttatctgccgctgcgggctttgggaatgtcaaccttggctacaccctgaacaagggctgctccccgatctgccccagtgaaaatgtcaatctcaatctcggtgtggcgtccgtgaacagctactgctgccaaagctccttctgcaacttcagcgcagctggcctcggacttcgtgccagtatcccactactgggccttggactcctgcttagcttgttggctctgctgcagctgagcccctgaccatcccccatgtgttctccatatccccccagctcaggaaaagcccagctccttttaggtcccaggggaccctaggaaccttcagctcctcctgggtgtgtctagttccccctccacactctctcaacgtcagggctaagtaccaaactcacccatacctgctctgttgaagtggtactggctacccttgcttccagagccaatcctataacctcccttggggaaccagcgaaggggtgaagatctccttggagtctcaagagtaccagagtcagcgccgaatcttgtggacacactgacaaggatgtctaatccaaatagatgtatatctgtgtgctcagtgtatccctgtgtgaatgaagccacttggattctggggtgggcaaagaagacctgaaaagattctacagcagaaggcctgtgtcgccaccaaaacccctccccctggtatcattgtacccaccttgtactctgttcaggaggctgcccatggaggactgccacccctccagatgaaggctcccactacccgatgcagttgagtcccatcctgccctctctgcccacactggcttcctgctgctattctagtgcctcaaataaaccgttcacaccctt

SEQ ID NO: 45 - protein, 136 aa, Mus musculus; identical to SEQ ID NO: 37

SEQ ID NO: 46 - DNA, 25694 bp, Homo sapiens
  misc_feature (1)...(25694): n = A,T,C or G
ccccctgctggcaacagccatgctggcggtggtgttgggatggaggtggagcaccggcaggcccaggcctgtggcattctttgtgccccacaggcagggtggtccctattccgtgcctagtttcactcccgcaacagtgttggtgcaagagtggggtgcaagggaggtggggctggctggctctgtgtctgccaaggctccaactgcaatggcagtcagcagggggcgtggggcaaacggtactcctgccacagcaatggcagggcagggtgcaaacacacaggtacactggcgggcaaggaaagcaaaacccacctgcacagacatgcactggcaaaagcaagatggggggtgacagtgggccctggagaagctacagtgtgggaggcagtgggcaggctggcacagggatgtgggggctgccctgctggagctctccaccaatcaggcatggtctgccagtgcagaagctatgctgcaggcccccagggcacccagagctgccctgcaagcaggcgtggccaggccggggccctgggagaggccagcagaccaaggcatgctcgggtcagactggccccatctgatgggcaagaccaccccacaaagatcacatacaacagctcccctagggctaaaatctcctatgggaggaatttgagcctgggggatggccctccactacagacgctcctgcaccaaaccctccgggctctgcctcagctggctgctgcccccgcaccttctctaggcagctctctctgccacctcgaatgtccatgtggttaatctcctcctgccgggattccagaggcccgtaatgacagtgggctcctccttgccagttcaactcacccattctccctgagtcttggggaccagtaacgagtcccagtgcgcagtggccccgtgcagggttcccagcttcctcccgcttcagcctagcttctgtgtcctcctgcagtccactctgggtgtcccgcagtccactcctggtgccttccctctgaagatctgttggaaacatgccagttgtctctgcccctcggtggcagctgtttcacctggctacgttgtcggctgtcttccaacttttagcctatttttctttaattcagttaattagagctctttttttttttttttttttttgagatggagtttcactcttgttgcccaggctggagtgcaatggcacgatcttggctcaccgcaacctcagcctaccgggttcaagcgattcccctgcctcagtctcctgagtagctaggattacaggcatgcaccaccacgcccggctaattttgtatttttagtagagacagggtttctccatgttggtcaggctggtcttgaactcccgacctcaggtgatccacccacctcagcctcccaaagtgctgggattacaggcatgagccaccgcgcccggcaattagagctgttttatagaaagaccacaagcgacacattaaatacacagacagacagaaatgaagaatcaagacagaattccgtgactaagaagtgtttagagggagagcaggggctttaaaacaatatctgcacaaatatagcccaaatatcggctttaatgaagtcgatttctaactatagagctctcaaaagaaaaatccttttaaaatctggctgggcatggaggctcacgcctgtaatcctagcactttgggaggccgaggtgggtggatcacctgaggtcaggagttcgagaccaacctagccaacatggtgaaaccccatctctactaaaaatataaaattagccaggcatagtggcgggcacctgtaatcccagctactcgggaggctaaggcaggagaattgcttgaacccaggaggcggaggttgcagtgaggcaagatcacaccattgcactccagcctgggcagtaggagtgaaactccatctcaaaaataaaaataataataataataataataaatcttttattactagatttcagccaggacaacgggccaatatttctggcttttgaattgttttactaaaggtaaatcagtgagccttaacaaagaggatgacttaaccacagatattcaaagtgtctccaaagagataataagtgatttttacaaggtctaaaatctccccaaaggtagttcaagacagaaaatcagaagctgtccatagaggggaaaataatcaataagcggcaaaagtccagcaagtattagaccacgaaggactcaatcccaaagccaggaactgaacccaggccactattgcgaagaaccaccagagccttagctagctgatctctagcacaaggtggctgctggtgtctttcccaggagtcagttccaacagcaattcaatctaaaaagcccgctaaagtccagatggcaattttccaggtttttaccatattagcaaaaggtatttccagaaagggagtaaagcaggcatctccgtgatccccaagaattcactctcagaaatgggcttaagaaagtgataggcggccaggcgcggtggctcacacctgtaatcccagcactttgggaggccaaggcgggcagatcatgaggtcaggagatcgagaccatcctggctaacacggtgaaaccctgtctctactaaaaatacaaaaacaaaattagctggatgtggtggtgggtacctgtagtcccagctacttgggaggctgaggcaggagaatggcatgaacccgggaggcagagcttgcagtgagctgagattgcgccattgcaccccagcctgggcgacagagtgagactctgtctcaaaaaaaaaaaaagaagaagaagaaagcgatagacagtaaaagccctgtagggacgagaccttttaagacaaaactcttgagagggctcaacacactcaggggaagagcaaggcaactcatttctgactcctggtcctcttggaccagccgcctgacgtgaacttgaaaattcctgccctccagatggtggagaccaggagagaattcctgcacatggtcacaaagtcacgctttcaaggacataaaccaagacaagagggaaacttcctccagtttttgctccaggaaaccgcagcaaagtttgtcactgaccagcctgtcggaccaggttgagccgtgggcttccaggggtcctgagctcatgtttatcctgtggtgcccccgctttatgacagaacaacagagaaaaacgaattcatagcacaaggtactccagatttgctacaggctcagactagcctcacaaatccttcttctcattaataaacagtggtttttaccattcactcaaccagtatgcacagagagagagggcccagaagcctggctggtaaggcattattattattattattattattattattatttttgaggtggagttttactcttattgcccaggctggaatgcaatggtgtgatctcagctcactgcaacctccgtctcccaggttccagtgattctcctgcctcaatcccccaagtagctgggattacagccgcccaccaccacacctggctaattttttttttttttttgtatttttagtagggacggggttttaccatgttggccaggctggtcttgaactcctgacctcaggtgatccgcccgccttggcttcccaaagtgctgggattacaggcatgagccactgcgcccagcccggtaagacattcttaccctgttgctggcatgccaggttttttgggtcccctttccctgggctgccctggtgaccctgctcacagcaccaaccacagctatgggggcgaagccacatcacaaaggaaaatcacctttttccacttcatggaatcacagggggaaaaaacctctcgattttgcaagatgctgcccagtgagctgcatggggaaccggtaaaattaacattttccatcccagctgtcgcaaaatacaaggaaacagacacaggtcacctcgctcagcagccaacattgaccgcacaaggctcagacttgccccctgtggtccctggtgtctttgatgcactcaaggtggggagggatgacctctcactgggaattcaatgggtggtatttgggccagatggacgagcggacggacacccccagtcaggcctgttgagcttccactaacaattccttcagggctcaccaaatgggaccacacaaataaggaggcttctctgagtgaggcttgctggacttccgtcagcgactccttcagagatcccccccacgtgttcaaacacacacacgacaccaccacaagtgtttccactcagaggcactcaccacgcagaagccgggtccagctgtcacggaatccaaaaccaagcgggggtgacagaaaggaaaataagatcttgggtccccagactcactatgccaaaggaaaaagttaagcttagaaactgagtcatgcaaaaaacaaaaacaaaaacaaaaaaaacccctgcctttccttttgttcttaaacagacagctacaagatagaaggccacgtgtctccccaggtggcctccctcacctgaaaatgtaaacgaacaacaaatcagccaggcacggtggctcgtggctcacgcctgtaatcccgcactttgggaggctgaggcgggtggatcacctgaggtcaggaattcgagaccagcctggccaacatggcaaaacccccatctctacaaaaatacagaaattagccaggcgtggtggtagtgcatgcctgtaatcccagctactcaggaggctgaggcaggagaatcgcttgaacccgggaggcagaggttgcggtgagttgagattgcgccactgcactccagcctagataacagagtggggctccatctcaaaaaaaacacacacacacacacacaaatcaactgttcctctggcccccactttcacctgcaacctggagagcagtggacactgatcacagcctcacaagaatatgaccctcccttttttcctttcctccttcccctgcggccacttctttctttaactattgaagccccaaaaccctctttggaaaaggagtgggctgcacaccctactgtgttttctgcctctttttcccgggcatggcttcaaccttggcaaagtgaacctctgaactggttgagacctgtctcagtcactctgtgggaggggcctcccctgaggttggggaagatgtcccaagaggagggacaagcagcaactcagggaggcctggagccaacttcggtttcagggttgagccagggtcaaggtggcagtggaagttacaggaagagcctaaggccccagtggtgggagcagatgctgaaatccccgggagcactttggactgtgccctgggagaggcgggaaccaagcctgagagcagagtactggcagctgcacgttagaatgtgaagcctggacacagggaggtcaggcagcgagctcacctcacggcagcccagccagagagtcagcctgctctccccgcactgagccaaggctgggagacagcctacctcccaccagagccagcaggcaggtcccagcccagcctgccccgtcccgccccagcctgccctgtcctgccatctgcactccccgtcaggcctcctggccagccccacagtccctgccttccaagagacacaggcagcggcagcaggggctggatgggggaggccaagaatcagaggcgctcccccacaggacccctgaatcgtggccagagaaaggtcagggcaggatgaggcctgtggccacgggcagatctcaggtggctgacccgtcctaggagcacacagggcagctgtggctccttccctcttgaacccagaaaacagggcagagctcatcggtggcctcatctgccagccccagcagtaaggccaccggctcattcttcatggggcagcagcatctggctttctggctccagacaccgcctgctgggccaggccttcaaccaggtccctcctgacagcaggcacgcctgagtccagacccgagacagagccgggaggcagcctgcagcaaacgtgccccaaactccacaggcgcctaacccagtcctgccaggggaaagtgctcaaggctctgccctctcgctggaggcccactgctcactctcacccgtgggacttctccccacaggccccagcagcctcctcccgtcatctgagacgctaccaggacaaaagtcttccacaactagggccaaaggcctcttagtcatggaagtctccctgaacctattctggttcggaggttgcctggtttaaaattttaaaaattaaaaaaacaaaagcctccgcatgacagcaggcccgtcccagtcttatgatctctctgctctggtgtgggaggaggagggagtgccgtgtgaggaggagggagtgccgtgtgaggaggaggagggagtcctgtgtgagggggagggagtcctgtgtgaggggggagggagtcctgtgtgaggaggaggagggagtgctgtgtgagaaggagtgctgctacgtaagaaggaggtagatgtgtggggggagagttggcattcggcccggtcaggactccatggcccttgttacagttgtgggtagaaatggaatctctgtgacatctcctgctcccctttcgcctgccccaaggcaggtctccagtactccctctcctttctgatcatgggcccaaagaggctcattcagagaggatcagtcccatgccctgggggcaggaatgctgagcacatagaggtttcctggaggggccacgtgggcggcatggaagctccccaccccttccgggagacggcgccctgtgcctctcgcgtgtatccatttataattaactgcaaatgtgtttccctgagttccctgagccactcttgcaaatcaattgaacgcaaaaccgggaggggctgcagtattgctgggaaagagggtcctgatccagaccccaagagcaggttcttggatgttgtgcaggaagtaatttggggtgagccacagagcacagtgagagaagcaggtttatttgaaatggctccgttccagagtggggcgtgctcagaaagcaggaggaggagggcctgtcctctgttagtgcctctgcttacaagaaactgtaaggagctacaattacacctggaatgggcagatgcacccactaaggataggggctgtgggtgccatcagtgcccgttcatcctccaacctcaggctgctcattgaaattatctctgagtaaagtggcctgcactcttgggttatctggacagtctgcgggcttgctgggagatgccccatatggccacaaatattctgtaattataattggtgtccagcttgagacatggctatttttagaccataagcattaaccttataggtgccttgtgagtgcctcctactcannnnnnnnnnnnnnnnnnnntgctgtgtgaggaggaggagggagtcctgtgtgaggaggagggagtgccgtgtgaggaggagggagtcccgtgtgaggaggagggagtcctgtgtgaggaggagggagtcccgtgtgaggaggagggagtcccgtgtgaggaggagggagtcctgtgtgaggaggagggagtcccgtgtgaggaggaggagggagtcctgtgtgaggaggaaggagtcccatgtgaggaggaggagggagtcctgtgtgaggaggagggagtgctgtgtgaggaggagggagtcctgtgtgaggaggaaggagtcccatgtgaggaggaggagggagtcctgtgtgaggaggagggagtgccgtgtgaggaggaggagggagtcctgtgtgagggggagggagtcctgtgtgaggggggagggagtcctgtgtgaggaggaggagggagtgctgtgtgagaaggagtgctgctacgtaagaaggaggtagatgtgtggggggagagttggcattcggcccggtcaggactccatggcccttgttacagttgtgggtagaaatggaatctctgtgacatctcctgctcccctttcgcctgccccaaggcaggtctccagtactccctctcctttctgatcatgggcccaaagaggctcattcagagaggatcagtcccatgccctgggggcaggaatgctgagcacatagaggtttcctggaggggccacgtgggcggcatggaagctccccaccccttccgggagacggcgccctgtgcctctcgcgtgtatccatttataattaactgcaaatgtgtttccctgagttccctgagccactcttgcaaatcaattgaacgcaaaaccgggaggggctgcagtattgctgggaaagagggtcctgatccagaccccaagagcaggttcttggatgttgtgcaggaagtaatttggggtgagccacagagcacagtgagagaagcaggtttatttgaaatggctccgttccagagtggggcgtgctcagaaagcaggaggaggagggcctgtcctctgttagtgcctctgcttacaagaaactgtaaggagctacaattacacctggaatgggcagatgcacccactaaggataggggctgtgggtgccatcagtgcccgttcatcctccaacctcaggctgctcattgaaattatctctgagtaaagtggcctgcactcttgggttatctggacagtctgcgggcttgctgggagatgccccatatggccacaaatattctgtaattataattggtgtccagcttgagacatggctatttttagaccataagcattaaccttataggtgccttgtgagtgcctcctactcacttcaagatggagtcactctggtcatgtttcattaaaccagaggcctggtgagcaagcgttcctctaacagtgggaacctcaacgtcgggccagtcggtaagaagttccagaggctggccctcgcagctcatgtgtgtgcatatgtgtgtgtgtgtgtgtgtgtgtgtgtgtaggtgtctggatctgacgctatctgcaggtaccggaatggtgttggaggacactcggctggtgtccgctgcagaactgatggcttgctcggtggcggggagacgtccacctgccacatttggccccagcagtcttgggagtctcctgtgttgatgtcttctgtgttgagtgagagacaggataaatggtttgagagttttttccaaacagccctcctcctaatgcagcttgttttctgaatcagagggtcctgtcttgaagggggcaaacccacccgtgctttcgtcccacagttcttactgagcccctgccatggcagggatggccccaggtgccggctgcagagacagaaccccctgccctcaccgccaacattccagaggggaagatgccctgcctgtgccccacgtaagacccagaggcagggactcccccgggccacagcctactggaggctcctgtccccagagacagctgggccatcgcccccaaagctgtggaagccccacccacgatgccatcataccacggccaggacatctcgtgacacacacagccccagcctcagcctccatacacacacacacacgcaccacacacactcactcatgcaaaacacacacacagccacattgactgcacccctagatttgagacaggggtgttacaggtgtctgtcagccccagccccctcctgaccacatggccacctgcccaccctcacatttccccacaccctccccctactcccgtgtggggttcagaagacccctccctggtgctcgccctgtcacccagaaaggaaacgcactgtcaactggagaacaggccggtggcagagccccagcgcccacagcccctcggagagggcctggcgggaggagaggcacccaccgatggcagagcctcagtgccctcgcagaagccagcacccacaacctcccacctcccaacccttgccggtctccccacccccgcctgagggatggccaaggaacagcccagcctggagcgggaagcagggacaagatgacctcaggaatcccaggctgcgggggtgcctgcgtcctcccctcccgagctccactccgcaggcgagacccccaacactgctccccgacactctccgaggcacccctcctccgtgctcacacccaaacacgtctgctcacccgtgggcttcccaccccgaacacaacgaggactgtccaggtgtcagtgacggtcaccccgacctggtcccctgtccggcctcgccaggtcagcacccgccgcgcgcacagcagggccgggtggaaggaggccgggcctggccgtggctcaggcgccacctcactggggaaactgggaggtggtctcagcccccttctgggcctcagcttccccatctatcccaaggagccggggtaggcctgggcggcgcggggacccccaccgcgggctcgccgactccgcccgccggaggcccctcccgcgtcccgcccctgcccccgccccggggccgcgcggctgcctgggaggctccgggccatccgcggtccaaagcgcgcgaggttcggggagctcggccaggctgctggtacctgcgtccgcccggcggtgagtccgcgggcccccggccgggacgcccccgccacctgcgcgcacgcgctcagacccggcggcctcggctgcggtgcacgcggccccggctcagccacgcgcggcggaaggcgccctgcgggggccggggcgggagagggtgggagagagcaagaggggcgcacggggaggcgcaggagaggggctggggctgccggtgggttggtccccagagagctgagcttctcctcccatcccccgcaggcctccccgaatgtttccaaagatctggggcgggagcgggcggagactgccgccaggagcctcccggccgccccaggctgcgcagccactggagcccatcacccaactccagacgctcctggctcctctacgtgggccgggagggacagccttgaggactaggggagggggcacgggaccttgcagagctcctggccggaaagggaggattgaccgcccccggcatatcaccccggagcactggaacccgcccccgcttcttgttttggcactggtggtgcttgcggtgaggtccaaggagcccagcctccctgagtggaccgccgggcccctccccgttccgggacacaggagaggctcccgccccttgctggctgggcagcccctagatacctggctcccaggggccagcttccctgagcctggggatgagccatgagcctgcagcctgggccccaggggcgccccccacggcctgccggctggctccctccgggctccatggcccacccggccttcctaattgccttcggctcccaccggtgccttagctcagcctggtggcccagcgggttgggtgccacccagtgagcaggtggcggcaccagctggacctgtttgtggccctgtatgctaggacttcctcagagacagctcagggaccccccccacctaccagaacctcacttagggggtggggggaaaaggaattggagatccttcctcctcgggctactccctggaggcggggataggccccagccggacttggcactgtttttggccacctggggctcccactcccaaccccaggatgtcagcccaggtctcactgtcctggcctgctgctctccccttagggcctctgcgggcccctctccagatctgttctctgaggcatcctccttacccccagtgcccagcactagctccccaggcccgggatgtccctcccactcctctgcccacggctgtccctgacagaaggcagcagcctccccctccaacaccatgcactcacaaaacagagaatcacgaccccagctgggtgtgttccagattctttctccagcagtgcagagggtcctgtgcagaggccgaggagcagtacagcgacccatctggccctttcctgctggtgggaccagtggcacgcagccttgtctctcggagcccatttcccagccacagaatggggagtagcagatactgagtggggtgctttcctcggaactgagtaacatcaggaatggggagtgctttccccctcagccatgccccacctggccccaggtctccatgtgaggggagctgcctgggctcaaaacactgagccatcccaaggaaaattctagatacagattagctaatatacactgacagatacacatatagatgtgtatatagatttctcttttttttgagacagggtctcactctgttgcccaggctgcagtgcagtggcatgatcatagttcacttcagtcttgaactccctggctcaagagatcctcccacctcagcctcccaagtagctgaccacaggcacgtaccacgcccggctaatttttgtattttttgtagaaacaggaggtctcactgtgttgcccagggtggtctcaaacccctggcctcatatgatcctcctgccttggcctcacatagcatggagattacaggcgtgagcccctgtacccagccccagactagctaatattatgactgatcaccattccccattccccattcccccaccccaggaccactggcagaggccactcactctgccttcttttctgtggttctgagaaggctgctgagtttcctcctcttgcctgtgcagccccctcctgccaggtttcaggagggagatagcctagagcatgtctgcactgagtgaggagtgggtcaggagagaagcagggaagtccttgtgtgctggcaggtcccttcccctctgctgtctgtgtcctcatctgcaaagtgggggtgcatggtcttggggaggagtgaggcaccacccggccccctaaccagtgtgtctctccagagcaggacaggctgctttggtttgtgacctccaggcaggacggccatcctctccagaatgaagatcttcttgccagtgctgctggctgcccttctgggtgtggagcgaggtgaggtgcccttggggaccccagacctttgtccagctgtgccctgctccactccctctccacccctctcccctgagcagacgctccaggggtccttccaggccgctcccagcagagggctcacccggcctggccacactgtctcactgtgtgtttgagtgtcgcttgacctgctcgacggccagggtggggtgtcactgtctttgctctgccttcagcccagggcctggtatacagtaatttctcagtaaatgtccactggggtcaggcctgggagggacactggaggcttccctgagacaggtgtgtcctccttccgcagccagctcgctgatgtgcttctcctgcttgaaccagaagagcaatctgtactgcctgaagccgaccatctgctccgaccaggacaactactgcgtgactgtgtctgctagtgccggcattggtgagtgccaggcctcagaccgtgccttcctcccctggccatctccctagcccgggccggggctcagcagaggccattgctgtctgtctgcagccgtctgtctctcccctgacagcctcatttcccatgcagggaatctcgtgacatttggccacagcctgagcaagacctgttccccggcctgccccatcccagaaggcgtcaatgttggtgtggcttccatgggcatcagctgctgccagagctttctgtgcaatttcagtgcggccgatggcgggctgcgggcaagcgtcaccctgctgggtgccgggctgctgctgagcctgctgccggccctgctgcggtttggcccctgaccgcccagaccctgtcccccgatcccccagctcaggaaggaaagcccagccctttctggatcccacagtgtatgggagcccctgactcctcacgtgcctgatctgtgcccttggtcccaggtcaggcccaccccctgcacctccacctgccccagcccctgcctctgccccaagtggggccagctgccctcacttctggggtggatgatgtgaccttccttgggggactgcggaagggacgagggttccctggagtcttacggtccaacatcaggaccaagtcccatggacatgctgacagggtccccagggagaccgtgtcagtagggatgtgtgcctggctgtgtacgtgggtgtgcagtgcacgtgagagcacgtggcggcttctgggggccatgtttggggagggaggtgtgccagcagcctggagagcctcagtccctgtagccccctgccctggcacagctgcatgcacttcaagggcagcctttgggggttggggtttctgccacttccgggtctaggccctgccccaaatccagccagtcctgccccagcccacccccacattggagccctcctgctgctttggtgcctcaaataaatacagatgtcccccagcttcctgctctgagtgtggctgcttgcgggagaggcagagcaccccaggtttggagggtcctggggtcttctgtggtatggtcaggggggtggtgggggaggaggagtcatccccctgagccacagccagctgcttgcctgacctcagagggagcccctccccagtgctctgccctttcttctgccccaggttcagcaggtcaagtgagttcctcctcccacagcggaaggaggtgttggggggcatggaggaaagaaagcgggtgcaagaaggagcacgctcaggctggggcagcacccagggccgtaggacttgggaatggagggtgtctgtctggacccgctggtgcagagggcacaaaagctgggctggggcaggacagacgggccggagtgtagtgagtggcctgtgggaggggcagggggctcccacgcagaagctctgggcagcagccctgacccatccgtgcctggactgcagcgctgcccgcttccccctggcaaacaggtggcagcctcctgacagaggaagccggcccaggccgccgtgtctgcagttgggtgctgtgcgctgcccagagggctctttgggctggagagagaaaacaagaacagacacccagtggaggtgtgtttgttcatttctccgggacagtgggagggagccggccagggtctcagccacttagggcccgaccctgaattttcccggctggccagaaactgtggtgtgtgtgtgtcaggatcccaggggcaccgtccagcaggaggggccggtggtcaacgtggaggcccgagattcccacccctggcagctgatgtgaatagccgggtcctcccaggtccctgaggtcaaggcaggtcaaagacctgtgtcctcctcctgggtccctgagctagtgattcctgtctgaaacacatgaatcattactgccacccatgaggggcccattgtaaccgagcgagagggcctggaagaggtcagcgggaggaggggcctgatcggtggatcagctatccctgtgcaaggacccggagcccatcagagcagcctgcagagactgagcttgagattccgtcgggagtttggattcgctgagtgggtcgctctagcattgagaaatgcaagcagagaacagagggtggaaaccagatggtccaggagcctgggcactgtagccaggaggacagagatcccggtgtgcagtgcgttcactgcattgttcactcggaatcgcaggtggctttgctggagggacagacagttgatcatagtggagctggtgagaggaagctgcacccaaaagccatggccgggaacctggatctgactgcagggaaacagaagcgtggtgggcgctgggcgatgatggaatttctaacaaatgctttgtttctgctaaagctaacttgcgcttccatctctggcatctcctccacttcccaggtgagctgactggttactgagcctcacaaccacactgagacgggggcgcagtcatcccctcgtttccccaggggagacaggctcagagtggaagccgcttgtcctcctaggatctgggactcggggcccagctctccctctgctctgggtttagggctgaggtcagaggcagccctgacctcctgctggtggtgggtagggtagtcccgccgggttcctgctgccccgccctcgggaggctggaggccccccaaggacaggtggtttccaggagcagcgggagggagcccgggttgtgtcctgggcctggagcagagaggggaggagcccagcgcctgagtttcaatttcctgaagcctgggggagggagaggaagagagcctcgtttcgtttcggggctctggacctgagcctcccgcccagggcccaccgcaccccgctaggacctgggatttcccagtctccacaccggcccggaactgggccccctcctctccgcagcccatccagccccacttccccgcttccccgcttcccagcatctgcccgcggatgagcctctggaggatgggcggcccgtcccggcgctgcccctcacccaccccccaccgctcaacccctgtggggacttcctgcagtgaggcccaggcaggacgctgcgctgcctcccccatccacagcctctgcccccttgacacccccgccctctgcggtgccttgcaggagtcgccagcctgtgggcccgggaccatttcacacgctgtccacagtcgtggaaacccggcagccacagcaggcctgggcccacggtgcctccacccctccgtcagcccccagcaagtcttcctgggggtccccagccctgagtgcgagaccctccaggctgcttctggacctcggggctggggctgagcccgatcctggctggaaatgagtgcagggccgggctgcctgggggaaggccctccagtctctgagccccaccctggggaatttgctgggacaccttgaaggccgcaggccagaccccaggggttaataagggaacaaagtccttgggcgaacacctgcatttactatctgagccagcaggcagctaggatgctgggtgagggggtctctgggctgctgggcggccaggcgggggcatcggggcaggagctgagggctgcactgggcaaccaccctgagctcctgtttacccaccaggggcagtgccagggcgggctgggctcacagcagagcccagaggaaggggctcaggctgagcaggagctccctgacagcctggcaccagaggccacgccgcactgtggccgccttgttacggaggctattttcacagcaggtcatgtccagcttctcaatcttcgagtcaatcagtctatcctcaatttctgtggggtaagaccctccagggaccacaggatgggtgaggttcataatctgggcacagagtggggccacagcccttgctagtgtagctgagcttctgccctgtgggcaagagaggagggtgtctggcacaggaggccccacccgaccccctcggacccgccccaggaccgcccccttcagggaaccttgaagccagtggggacgcggaggcgagcagaagagaacgggcggcggccccaggccccacaccaagtctgcagtccattagatggaggtccctgagctctgtccccagatctaagcttccaccaggccagggggctcaaggcagagcccctgggatgctgccagagagtgccctgcccacccctcacctgcctacagacgctgggtcccacccaggactcaccatcgatagtgccagtgaccacagaggaggggcagctttgagcctgcatgggataggagacggggtgacacaggctggggtccaggacaccgtagcactggaagcactcaaggccctggcctgggatggggcggggagggtgcaggtcagggtcgcaggctgaagggtgggttccagtccctctcaccagcaccggcagcaggcctgggcagcacacaggtaggctcaggtgcccttggctactcagaattgtgggcagggtcctgctggcatctggagcccccagcatcaagagggtcttactcccaccttcaggcctccttcccatcccccaccctcagccagcagcagcatggggctagtgaccttcatggtcttgggtatgggtgcattgagggcacatgtggcacagaggctctgagcctgggaagagctaggggaggccttgcacccccgagcctgggaacctctgccccacttctggtttgtgatgaggaacccggattgtttgtgtaaagtgcacacagctgatggcctcatcccatcatctcacagaatgggaattgaggggtagaaacccttccttcctgacctggctgctctggaaggcagacatgaccttgagcaagacccctctcaccccaccccttctctgcctggggcctcccagagctcagggtgtgagcagaacagatccggagggaggaggggctgcggtgaggagaggaggggctgcggtgaggagaggagggagaggttgtcccctggggtgggaggacgccttaggagaagttctgactcaatagagaggagggtcctggactagggccttgagtttcagtttcagtttcctggtgcatcacagtgttggtgtctgaagcaggagagaaaagcagccgtgagacctcaggtcacacccaggaccaggcccttcccgctcaggatgagggtctctggctgagcccaccactggcaggcccccgtgcagacagagcctgggaggggccagcagggcaacaagctctgacactgagaccccaagccaggcaccccttgttttctgtgcagggagcagaggcccctgtaacggggtgggacgacatgggggctcccttggggcaggggaggaggggtccagaactctgtcctggccacaaccggaaccacccctgtccctcccccctgcccacnnnnnnnnnnnnnnnnnnnnnnnnnnnnnnnnnnnnnnnnnnnnnnnnnnnnnnnnnnnnnnnnnnnnnnnnnnnnnnnnnnnnnnnnnnnnnnnnnnnnnnnnnnnnnnnnnnnnnnnnnnnnnnnnnnnnnnnnnnnnnnnnnnnnnnnnnnnnnnnnnnnnnnnnnnnnnnnnnnnnnnnnnnnnnnnnnnnnnnnnnnnnnnnnnnnnnnnnnnnnnnnnnnnnnnnnnnnnnnnnnnnnnnnnnnnnnnnnnncacccccatcacacccacacccgaatttgttcttcacggagaatcagaagacacaggaaatgggccaggggtgactgactgcagactccaccccccctccccaaccaggtgctgggcagaaggaagagagggctgcctgggctgtggggacagagcccttgatgaagacagataaaggcagcagacctgcataaggatgggtcgcctctccggtgggtggtcccttccgaaaagcagaatccactctgtgccctcaggggtctctgcttggagagtccatggcatctgagaggatgggccaggtgaggtgggggtggctcctgagagcagggaggacaagggcggagctggaggcgtcaggcccagaagacccccccagtgactcggggcagctgtgggcaaggcttggacccaagaggcctgaccaccccgcctggcagcacaccagagcacaggccagacctgaaggggcagcgccaggggggcccatggtccacgggtcactctgctggccctgcggccacactgctcaggtcccagggcctgatgatggctgagccagacatcataacaccaagcaatggagaagttagaatattgctagggatactgacttgtatttttgaatcttaaaatatatgttttaatctgacatctataagcagtgcatgttacatgccagtcagagcacgagcatccccaagaggtgtgcactctgtgtatctatggataatgaaagcacggctttcacacagcaagttatcctcacttcctgtgatcaactctgatatcttctactttatttgaaagagtattgattgtgtcccactcgactgattttacaccctctatgtacatggtccccagtttatgggcagggcggttattttgtgttttattttgtttttgagacggagtcttgctctgtcgcccagtctggagtgcagtggcgcgatctcggctcactgcaacctccgcctcccgggttccagcgattctcccgagtagctgggattacaggcgcccgccaccatgcccggctaatttttttatttttagtagagatggggtttcaccatgttaggctggtctcgaactcctgacttcaagtgatttgcctgcctcagcttcccaaagtgctgggattacaggcatgagccaccacacctggcctgttatgttttttgagatagggtctccctctgtcacccaggctagagtgcagtggtacaatcacagcacattgcagcctcaacctccctcccaacctcaacctgcaggggaggggagggagaggaagggaggctcatctcagggctctgaacctgagcctcccaccagggatttcccagtctccacactggcctggaactgggcgccctcctctctgcagccccatccagcccccacttcccagcatctgcccacggatgagcctccggaggatgggcagcaagtcctggcactgcccctcacccgccccccaccactcagcccctgtggggacctcaggaggtaaggcccaggcaggaccctgtgccacctcccccatccacagcctctgcccccttgacgcccttgttacagaggctcttttcacagcaggtcatgtccagcttctcagtcttcaatcaatcagtccattctcagtttctatggggtaagaccctccagggaccacaggatgggtgaggttcataatctggacacacagggagggccacagcccttgctagtgtagctgaacttctgccctgtgggtgaaagaggagggtgtctggcacaggaagccccacccgacccccttggtcccaccccaggaccgcccccttcagggaaccttgaagccagtggggacacagagacaatcaggagacaagcagaaaagaacaggccgcgccgagtctgcagtccttccaggctcaagcgatcctcctgcctcatcttccaagtagctgggaccacaggcacctgccactacccccagctatttaaaaaaaaaaaatttatagagatgggatctcactatgttgcccaggctgatcttgaactcttgggctcaagtgatccccttgcctcagcctcccaaaatgctggaattgtaagcgtgggcctctgcacccggcctggtccgcaatttaaaaacgcacagccaccattccctctccagaaagcacccagatgcctttgggagaaccagcctcctccatggaggaaagcttgggatctgccttcccacctggggaggagagggatctgtggaaaatccttctgacggacttcccctcagtgcctgatccatactcaatagtagaaaaagtaagaaatatacaaagatagcagatacacggagacagttccccaaatagctgagcgaatagcgcagaagcaatattgaagacctaatagctgagacatttccagaactgataaagtgcatccagccacagatcaagcagcccagaaaattccaggcagcatcaacaaataaatagccccacatgcacccgtgaaaatgcagaagaccaaacaaaaaagtcctgtcaacagccagagaaaaagatcagccaccaggggtcggtagtgagaaggacaactgtggaagccaggagagacgacagccctgagttccacaggcaatggaagaaagactgtcagacagaaaggttgtccccaatatacttgcactaaaagaaaatctttttttaattaattaattaatttatttattttagacaggatctcactttggagtgcagtggcgggaacacagcttattgtagccttgacccaggctcaagcgatcctcccacctctgtccccgaagtagctaggatgacaggtgtgcaccaccatgcccagctaatttttgtattttcatagaggcggggtttctccctgttgccccagctggtcttgaactcccttgatcaaggaatgctgggactacaggtgtgagccacagcaccggccaagaaggtcttttaaaaagtcttttcgggcacggtggctcatgcctgtaattccagcactttgggaggccaaggcgggtggatcacaaggtcaggagttcaagaccagccttgccaagacggtgaaaccccgtctctactaaaattagctgagtgtggtggtgggcacctgtaatcccggctactcgggaggctgaggtagggaattgcttgaacccggaggcagaagttgcagtgagccaagatcacgccactgcactccagcctggcgacagagacagactctgtctcaaacaaaaaaaagaaaaagaaaagaaaagtgatctttaggctggacatggtgcatggtggctctcacctgtaatcccagcactttgggaggcctaggcagaaggatcgcttgagtccaggagttccagaccagcctgaccaacatggagaaacctgtctctactaaaaatacaaaaaaattagccgggcgtggtggcgcatgcgggtagccccagctactcaggacgctgaggcaggagaatcgcttgaacccaggaggcagaggttgtggtgagctgagattgtgccattgcgctccagcctgggcaacaagagcaaaactccatctcaaaaaaaaaaaaaaaaagtgatctttaggccgggcacagtggcttgtgcctgtaatcccagcactttgggaggctgaggtgggtgaatcacttaaggtcaggagttgaagaccagcctggccaacatggtgaaaccccatctttaccaaaaatacaaaaattagccgggtgtggtggcacgcacctgtgatcccagctacttgggaggctgaagcaggagaaccacttgaacccaggaggcggaggttgcagcgagccaagatctcgccactgcacgccagcctgggcaacagagcgagactacatctcagaaaaaaaaacagtgatctttagccagaaggaaaatggtcccattcagaatcagagatacctcaagtgatgaagcacagattcgtagaaatgtggtgagtctaaatgaacatcaattctattaaaaaagataaaatagtggccggcgcggtggcttacgcctgtaatcccagcactttgggaggccgaggggggcggatcacctgaggtcaggagttcaagaccagcctgaccaacatggtgaaactccatctctactaaaaatacaaaaaaaattagcaaggtgtggtggcacatgcctgtaatcccagctactagggaggctgagatgggagaatcacttgaacccagaaggcctctcacgccattgcattccagcctgggcgacagagcaagactccgtctcaaaaaaaaaaaaaaagttctgtcttgtgggagatttaagtttttgtggtgaaattaaaattcataccataaatacaaacctggaaaggagtgaatacaatgaggcgaacccactgggcggttacacagtggcccacagctgtagtccccactactcagaaggctgaggcaggaggacggctggagcccaggagttcaagacccacatgggcaacatagtgagatggagcagggacccctcctaggtgcctgccaggctctcccaagcttggaaatcaaggaacactcttgaatcccttcaagggaaattccagtcaccttgccagccttgaaaggtaagtgagcagcctgccaggaaggcgacgggagcacgggtctcccaagcaggccacagccacaggtggtttgcttccctatagaaactaaagcataacatacattctcaagtctttcagaaacccccacccggtggaaaatgccgactgctatcacagagacccagataagggggaactgaggactgaactctggccgtgttctctgtcatgaatttcttcttgaggggcctggagggagtcacagctgtgagccactaatgtgtgcccccatgcacacagcacccttggcataactaactccatcttagagactccattgtatatcttacagggcacttggccaacaaaggtaagatgttttgcttaataaacaagttaaaaataaagcctgcatccaaacagatgaggacgcaagcaagcgcactcttcagatgtcacttctcacgggaggcctctgtgattgcagaaggaaaggccccagcagaactcaccatctgccgcctgaggctccaccacctcgaagacatccttgcaagatccacagactggcccagaccaggaggtttctgtcttcttcttgtgtcttcttcactctcctggactggttcgtgaaccctttctcctatctctgtttcctctggatgttaaatgctactttctttgttgtggaacgttaacctgtaacatgtatatactgattaagtacactattacgttgtcgtgtgcaatattggctgacatgtgcagtggcttgagcccgtgtgaccgcagctctcactactgagggaaaggagcactaagcagcatgcctccttgggaacgccgtgtggctcgtggctttagggattgaaatagcctcaataaaattctgacattgtgaaagacacaggcatgcttggatgtgattatctctaactttgcactgctcatgacaccccatgtattggttaatgattttgcctgcaacttctgctttcctgaaatgtacccatacccctaaaaaccccagcttgtaagccactggggagtttgggtcttaagcgtgagctgtccgttctccttgcttggtatcgtgcaataaatatcatctttcccctgctgcaaattgcaacatcagtgtttgactttactgccctgggtgagaagagcccagctcggttcagtaactgtagaagactgtaagaggcgtccaaactggagtgaccccatcgtgaataaaagctaaacaaagccacacctgctgggtgacattcccaggggttgggcattgtgtgtcacaagatgcctgtggttgagggaacgagttaataatgctaactaattaatcagacgcagaacttaaggaaatgtcccaacattttaagaacaaaaagcattctaagttggagaataagatttgctttaaaaataatggtataggagtcaggtatggtggctcacacctgtaatcccagcactttgggaggccaaggtggacagataacttgaggtcaggagttcgagaccagcctggccaacatggtcaagatacctccaaatctttatttatgtatttatttatttattttggagacagggtctcattctcactctgttgcccaggcttttttttttttttttttgagacggagtctcactctgtcgcccaggctggagtgcagtggcacaatctcggctcactgcaacctccgccgcccacgttcaagcgattcttctgcctcagcctcccgagtagctgggattacaggcgcctgccaccgcacctggctaatttttgtatttttagtagagacggcgtttcaccatcttggccaggctgggcttgaactcttgacnnnnnnnnnnnnnnnnnnnnnnnnnnnnnnnnnnnnnnnnnnnnnnnnnnnnnnatcacgtgcctggccttaactcttctataaatagattaccaacagacgaaagaaaatttaaggcataaagcatgcagttaaaaggcttaattcaaaat

SEQ ID NO: 47 - DNA, 1294 bp, Homo sapiens
ggttcggggagctcggccaggctgctggtacctgcgtccgcccggcggctgcagtgcagtggcatgatcatagttcacttcagtcttgaactccctggctcaagagatcctcccacctcagcctcccaagtagctgaccacaggcacgctgctttggtttgtgacctccaggcaggacggccatcctctccagaatgaagatcttcttgccagtgctgctggctgcccttctgggtgtggagcgagccagctcgctgatgtgcttctcctgcttgaaccagaagagcaatctgtactgcctgaagccgaccatctgctccgaccaggacaactactgcgtgactgtgtctgctagtgccggcattgggaatctcgtgacatttggccacagcctgagcaagacctgttccccggcctgccccatcccagaaggcgtcaatgttggtgtggcttccatgggcatcagctgctgccagagctttctgtgcaatttcagtgcggccgatggcgggctgcgggcaagcgtcaccctgctgggtgccgggctgctgctgagcctgctgccggccctgctgcggtttggcccctgaccgcccagaccctgtcccccgatcccccagctcaggaaggaaagcccagccctttctggatcccacagtgtatgggagcccctgactcctcacgtgcctgatctgtgcccttggtcccaggtcaggcccaccccctgcacctccacctgccccagcccctgcctctgccccaagtggggccagctgccctcacttctggggtggatgatgtgaccttccttgggggactgcggaagggacgagggttccctggagtcttacggtccaacatcaggaccaagtcccatggacatgctgacagggtccccagggagaccgtgtcagtagggatgtgtgcctggctgtgtacgtgggtgtgcagtgcacgtgagagcacgtggcggcttctgggggccatgtttggggagggaggtgtgccagcagcctggagagcctcagtccctgtagccccctgccctggcacagctgcatgcacttcaagggcagcctttgggggttggggtttctgccacttccgggtctaggccctgccccaaatccagccagtcctgccccagcccacccccacattggagccctcctgctgctttggtgcctcaaataaatacagatgtcccccagcttcctgctctgagtgtggctgcttgcgggagaggcagagcaccccaggtttggagggtcctggggtcttctgtggtatggtc

SEQ ID NO: 48 - protein, 131 aa, Homo sapiens
MKIFLPVLLAALLGVERASSLMCFSCLNQKSNLYCLKPTICSDQDNYCVTVSASAGIGNLVTFGHSLSKTCSPACPIPEGVNVGVASMGISCCQSFLCNFSAADGGLRASVTLLGAGLLLSLLPALLRFGP

SEQ ID NO: 49 - DNA, 1268 bp, Homo sapiens
ccccgccccggggccgcgcggctgcctgggaggctccgggccatccgcggtccaaagcgcgcgaggttcggggagctcggccaggctgctggtacctgcgtccgcccggcgagcaggacaggctgctttggtttgtgacctccaggcaggacggccatcctctccagaatgaagatcttcttgccagtgctgctggctgcccttctgggtgtggagcgagccagctcgctgatgtgcttctcctgcttgaaccagaagagcaatctgtactgcctgaagccgaccatctgctccgaccaggacaactactgcgtgactgtgtctgctagtgccggcattgggaatctcgtgacatttggccacagcctgagcaagacctgttccccggcctgccccatcccagaaggcgtcaatgttggtgtggcttccatgggcatcagctgctgccagagctttctgtgcaatttcagtgcggccgatggcgggctgcgggcaagcgtcaccctgctgggtgccgggctgctgctgagcctgctgccggccctgctgcggtttggcccctgaccgcccagaccctgtcccccgatcccccagctcaggaaggaaagcccagccctttctggatcccacagtgtatgggagcccctgactcctcacgtgcctgatctgtgcccttggtcccaggtcaggcccaccccctgcacctccacctgccccagcccctgcctctgccccaagtggggccagctgccctcacttctggggtggatgatgtgaccttccttgggggactgcggaagggacgagggttccctggagtcttacggtccaacatcaggaccaagtcccatggacatgctgacagggtccccagggagaccgtgtcagtagggatgtgtgcctggctgtgtacgtgggtgtgcagtgcacgtgagagcacgtggcggcttctgggggccatgtttggggagggaggtgtgccagcagcctggagagcctcagtccctgtagccccctgccctggcacagctgcatgcacttcaagggcagcctttgggggttggggtttctgccacttccgggtctaggccctgccccaaatccagccagtcctgccccagcccacccccacattggagccctcctgctgctttggtgcctcaaataaatacagatgtcccccagcttcctgctctgagtgtggctgcttgcgggagaggcagagcaccccaggtttggagggtcctggggtcttctgtggtatggtc

SEQ ID NO: 50 - protein, 131 aa, Homo sapiens; identical to SEQ ID NO: 48

SEQ ID NO: 51 - DNA, 1281 bp, Homo sapiens
tgcgtcctcccctcccgagctccactccgcaggcgagacccccaacactgctccccgacactctccgaggcacccctcctccgtgctcacacccaaacacgtctgctcacccgtgggcttcccaccccgaacacaacgaggactgtccaggtgtcagtgacggtcaccccgacctggtcccctgtccggcctcgccagagcaggacaggctgctttggtttgtgacctccaggcaggacggccatcctctccagaatgaagatcttcttgccagtgctgctggctgcccttctgggtgtggagcgagccagctcgctgatgtgcttctcctgcttgaaccagaagagcaatctgtactgcctgaagccgaccatctgctccgaccaggacaactactgcgtgactgtgtctgctagtgccggcattgggaatctcgtgacatttggccacagcctgagcaagacctgttccccggcctgccccatcccagaaggcgtcaatgttggtgtggcttccatgggcatcagctgctgccagagctttctgtgcaatttcagtgcggccgatggcgggctgcgggcaagcgtcaccctgctgggtgccgggctgctgctgagcctgctgccggccctgctgcggtttggcccctgaccgcccagaccctcccagccctttctggatcccacagtgtatgggagcccctgactcctcacgtgcctgatctgtgcccttggtcccaggtcaggcccagtggggccagctgccctcacttctggggtggatgatgtgaccttccttgggggactgcggaagggacgagggttccctggagtcttacggtccaacatcaggaccaagtcccatggacatgctgacagggtccccagggagaccgtgtcagtagggatgtgtgcctggctgtgtacgtgggtgtgcagtgcacgtgagagcacgtggcggcttctgggggccatgtttggggagggaggtgtgccagcagcctggagagcctcagtccctgtagccccctgccctggcacagctgcatgcacttcaagggcagcctttgggggttggggtttctgccacttccgggtctaggccctgccccaaatccagccagtcctgccccagcccacccccacattggagccctcctgctgctttggtgcctcaaataaatacagatgtcccccagcttcctgctctgagtgtggctgcttgcgggagaggcagagcaccccaggtttggagggtcctggggtcttctgtggtatggtc

SEQ ID NO: 52 - protein, 131 aa, Homo sapiens; identical to SEQ ID NO: 48

SEQ ID NO: 53 - DNA, 610 bp, Homo sapiens
accagtggcacgcagccttgtctctcggagcccatttcccagccacagaatggggagtagcagatactgagtggggtgctttcctcggaactgaagcaggacaggctgctttggtttgtgacctccaggcaggacggccatcctctccagaatgaagatcttcttgccagtgctgctggctgcccttctgggtgtggagcgagccagctcgctgatgtgcttctcctgcttgaaccagaagagcaatctgtactgcctgaagccgaccatctgctccgaccaggacaactactgcgtgactgtgtctgctagtgccggcattgggaatctcgtgacatttggccacagcctgagcaagacctgttccccggcctgccccatcccagaaggcgtcaatgtggcagcctcctgacagaggaagccggcccaggccgccgtgtctgcagttgggtgctgtgcgctgcccagagggctctttgggctggagagagaaaacaagaacagacacccagtggaggtggctttgctggagggacagacagttgatcatagtggagctggtgagaggaagctgcacccaaaagccatggccgggaacctggatctgact

SEQ ID NO: 54 - protein, 86 aa, Homo sapiens [sequence omitted]

SEQ ID NO: 55 - DNA, 1251 bp, Homo sapiens
accagtggcacgcagccttgtctctcggagcccatttcccagccacagaatggggagtagcagatactgagtggggtgctttcctcggaactgaagcaggacaggctgctttggtttgtgacctccaggcaggacggccatcctctccagaatgaagatcttcttgccagtgctgctggctgcccttctgggtgtggagcgagccagctcgctgatgtgcttctcctgcttgaaccagaagagcaatctgtactgcctgaagccgaccatctgctccgaccaggacaactactgcgtgactgtgtctgctagtgccggcattgggaatctcgtgacatttggccacagcctgagcaagacctgttccccggcctgccccatcccagaaggcgtcaatgttggtgtggcttccatgggcatcagctgctgccagagctttctgtgcaatttcagtgcggccgatggcgggctgcgggcaagcgtcaccctgctgggtgccgggctgctgctgagcctgctgccggccctgctgcggtttggcccctgaccgcccagaccctgtcccccgatcccccagctcaggaaggaaagcccagccctttctggatcccacagtgtatgggagcccctgactcctcacgtgcctgatctgtgcccttggtcccaggtcaggcccaccccctgcacctccacctgccccagcccctgcctctgccccaagtggggccagctgccctcacttctggggtggatgatgtgaccttccttgggggactgcggaagggacgagggttccctggagtcttacggtccaacatcaggaccaagtcccatggacatgctgacagggtccccagggagaccgtgtcagtagggatgtgtgcctggctgtgtacgtgggtgtgcagtgcacgtgagagcacgtggcggcttctgggggccatgtttggggagggaggtgtgccagcagcctggagagcctcagtccctgtagccccctgccctggcacagctgcatgcacttcaagggcagcctttgggggttggggtttctgccacttccgggtctaggccctgccccaaatccagccagtcctgccccagcccacccccacattggagccctcctgctgctttggtgcctcaaataaatacagatgtcccccagcttcctgctctgagtgtggctgcttgcgggagaggcagagcaccccaggtttggagggtcctggggtcttctgtggtatggtc

SEQ ID NO: 56 - protein, 131 aa, Homo sapiens; identical to SEQ ID NO: 48

SEQ ID NO: 57 - DNA, 61009 bp, Mus musculus
  misc_feature (1)...(61009): n = A,T,C or G
ccactagtactcttagctcctgagccacccctccagccccagaggagatgctttaaacagtaaataatgggtaccaaaacacagttagtgggaaaaaagtagttctaccaatctgtggcatggtaggataactgtagtctacaacagcttatgagagaaagatctgaatgttcccaataaacaggaatgaaaaattcaaggagatggaaatgttagcaccagactgcatcataacacactgctcgtatgtactgtgatactgcacttcataagtgagtacaaacattatctttcaattcttttaaacaaagaatacgccgggcggtgtggcgcatgcctttaatcccagcacttgggaggcagaagcaggtggatttctgagttcgaggccagcctggtctacaaagtaagtgccaggacagccaggactatacagagaaaccctgtcttgaaaaaccaaaaaaaaccaaaaaaacaaaaaaacaaaacaaaaaaaaaaccaaactttgattctggaggtgtatcacttagcaacggagcatgtaccccattgatgggacatgtatcagtacatgtaagaccctgggctccaaccccagccacaaactaaacaacaacaaaaagcccaacttcttgaaaatgttaaaaaaaaatccttagtctttgattttcttttttaaatgagacattgggccttccagaaccagagaaaataagaggaatagaagacaaaacctcagtaataggatttaaaaacaaacagatgactagttctacaaaatacctttgttaaaacagtttacatgactattttaaactgacctaacaaaaaagtaatggaaatctaatcttggcatggtagcctatgcctttagtcccagcacttgagaggcagagggaatagatctctgtgagttcaaggtcagcttggtttgtctacataagaagtttcagggcaaccaaggcttcatagagagactatgtataatatgctaggccctcccccatcaattactagttaagaaaatgccctacagccagatcttagggaggcattttctcagttgaggttcccctctttcagataactccagcttgtgtaagattgacataaaactagccagcacattgtttcatcctgtttgaacatgtcctgtggctcagattctatccttcaaagtcttcctcgccatcaatccaactgacatctctaccctcacattcctttggcctcccagtcaactgtacttctagttagctgttgagcacagattatacctgaaggacctacctaaaaaggctacattcacccttcaaggacagcaacttatgtctttcctgaacatagtcatccataacgttctctttgctaagcgtctcccgctcttcttcatcatgatcactgggcaactaccaccttctactgttagaaagagcaaaggctcacctctaacctaagaggaggcaatctgggtcagatagttgatgcatgatatgatgtgcagtttcttctgagaagtaccagacatttctgataagagagttgagcaacttcctgatatgtgagactcagctttatacagttgaccaaccaaccaccagtcctgaaggaacattagtgacccttagacaaatgttccttaaattaatctattggggtcatctagcctacctttttccttccttaaaagtctttgccaggaaagaagtatttgaaatagacttagtggaaactacctatttccagcaggtttgaaacaaaacttggacatgtgctcacaagcatttgtctgaaatggcttgaaatgtatccttgttgtatattcacattcacatatctcaatgcatcatggttgaacacccatatgtgttatgaaatcagtgcttatttcaaaaatatattggatgtagcctgtctccagagcccacagtgtgatacctttatcctaagatcctcagactcttatgagttcaaagtgcctgtgacactcctgtaacactcctgtctataaatatactgattatatgctggcgtgcatttttccctcaagggaggaaattaagatttcaccagatcttatttgcaaaacaaaacagtcagcaactaggctagaagtaaaaagttatgtcaatagtgggtgaaaagacagcttggtgacactatgagagaaggcaaagggttctttctgaaaggcctcctgggagaagctagacttaaaatcttccattgcagctgtaaacacatctggacaatagtctgttttctgcatttgtgaatcccacacccatggaactatgaatcgtgcatcagagttatttaaaaccaccgtgcatggagtgaaccaataccgaggtgtttgcttatcattttcctttgagcacacagcacagccttgaactcagtgacactcctaagagggctctagggtcaggccaacttagatgagatgctagtctttagctaaagatgcccttccacccccgttgcacgaccttgcttctcagtctttgttgagtcttctgggggagaatccccctagaggactcagtttacaaaaccctaagtgagaccactgccaagaagtgcttgctcacccctcctgccgcggcagggaatccccctttccttgtacaggcaaaacacaaaaaaggactcataagtgaagcctgatccttctcaccaaacactgcccacacctcctagtaattgaacttgaaaaaaaaaactggtttgaaaaattaccgcaaaccatattgtcataaaaaaaaaaaaaaacacttcctatatgagatcacagaacagagtaggcacaagttcctgctgagcagatcagcctaatgcttaaatagaacaactcctggctgtcattgacattgtctaaaagccaagatgacagactgagaggcctgagcccttgttctggcattctcccaggaagatgcagtaaaggggttgacccaatatactgcagagaatttcatccagttccctcctccatcctgatcccatgtgccaggaagatggagccacgcttgctgatgttggggtttctctcattaaccatagtacccagttgtcgggcaggtaagagaccaggaactgccctgggaaccttgggaagactaacagaatcttggtaagcctacatctgctcagctatacaaccagagggaacaatgagatggaaaactttgaagagggagttgaatcatgggttctaactcttgtccagggtccactaggacctctttttgtgcctcagtggtccctaatctatcaacctttcttaaaatagcaggaaggaatttctcattcatagtcctttttaggtttcattcccagggatggtttggctttgctgtcttggaagtttcttgtaaatatcattttatggcaatttcagaaaacataaatatattcatttttcagagcatgactttcctctgcttctctgggtgtaacgtctgtgtgttttacataaatatgaattccatcatcatagattttgtcaggtatagttttaagaaataaaaaccatcaccaactcagacatcaaacaactcttcttaattgaggatgaattccctaataccattttttcttgctaatccagaaagagaagtgaggtttgtggaaatacatatatttcaagtctattagatagattatagatagatagatagatagatagatagatagatagatagatagatatgggactgtctcactatgtagtcttggggtgcttggaatttgccatgtaaactagtttggcctcaaactcataaagatctacctgcttctgtgcataaccccacactaggctgaaaatatattttttgaaagcctacagtttcatattcttaatttctaggaatttattcttaaatgaccccagaaaaatgtattaagaagagtaaaataaataacatatacacgaagcttgattgctgactgggggcaagtgatcacattgtgttgggtcacttgggagcatcttggctttggagttaagatgtttatgattttaggaagcttttattgtgtgatttctcccctaaaagtatctatccctcaatggtgtctttgtcaggttagttcaagtcagaacaaccaagtctttacagttatgtgtattctgtctctgaggaaaggctttcaagtaaacttgtgttatgagctgtggttgatttatataaagctcatttacttggttttgcaaaacatctgtccactacttcttatgcatgtgtatatggggaaatgacagcattacaggttggaacatgcctggagctacaggggtgtggggctgtcagagaagacttcatgaagatagcgtgtccattgagccctggagactggtaaatttccataaggaaagattttagatgagaaggcacatggatcaggaaatagaagagtctgaggagtcagtatatgtattctctgaatatggggctattggataaagaacagaaagataggaatggggccaaaggcattaaagctctggacaggaagctcaatccttttcttttcctgtgttgttggggatagaaatccaaggctttgagcacactaagcaagcactctaacgctgagctgcattcctagcccacaacttaaaatactttagttgtatttggtaggcaacagaaaactacttgaaaaatgtcagggaatgccatttatagagtacacttgataaatcagatgtatacattttattacaacttctaatcactttacagtgtgggtgtcatgaatcagtagaagtaaccccaaaatcagaatatcagtgttgcaaggctcacatcacttttgtattttctattggagacaagaccagaggtgattctggctgataatagaaagagatcaggtgcaaggagttatgtcaagaggcaacttggttcccagtgggaaacagaaagaaatggccagaggtcagcaagtagctcagaaactaacccagggcaagagatgatcttatttcaactttgtttatcgtccaggaagaatttagtttaagcaattaatggggctggagagatggctcattattggtttagagcactcattactcttgtgatgcgttgagaacccaggacccaagatggtggctcagaaccatctgtaactccagttccaggtgatctgacaacttcttctggcctccataggcaccgtacacatggcaaataggcatagatgtgggtcaaatgcatatacacgtaaaaataaataaatattaaactttaagaaagggtagaaaaataaacaaatctttctattccttgggggcaagaggtctttaatgaaataagacagactgtcaacagattcaatttctagctgattcataaggcagattttcattttgaaaatttccaaagccaccatttaaaattgtgatgtggtacaagggatgtattagtcaacccgggtgtttttagtctctgtatcactgggccttgggatgtggttaaaagagaattctccctgatgttgccaacacagcagcagctaactgaagccacctttcttagaactgtggaaactctgagctgtctcttgatcatttttcattctaggaattctgtaatcaaatccttatccctctagagtcagaagacagaaggtatggaaacatgttaaggtggtacgcatgtctagttatcccttctggtaaaggctactgcccacactagaagttccggtcttcagctccgttatgcttcccagtgccccgtcagtttcttcacagtgttagagctattgtgactttgttcatcatccaaaatagaccttggagacatgtggttttgctaagcactgggaatacttaataaagcaaacattacatttgtccctaagggtctaagatagcctgatatggaacttatgcctgtgcttgatttagcttggaacattgaaaaaacagtaatttatttcatccacttacatgtcatctggccatgctctgaaagaacagcttccgaatgctcaacacctccatcactgggtccctcccaaaggcagggatttttgtgttcatgtatgcatatgtgtatttttgtggctatgtgtgtagatgaatgtgtgtggaggccaaaggtcaacttaggtattaatcctcaggtgccattcacatgagttggttttcttattatttgggttttttattattgttgtctagagatggagtttcttgctggtctgggactacatggttaggctaagctggttggtcaagaatctgcctacttctgctttcttagggctgatactaaaggtatgcactgctgtaatatatacatacatacacacacacacatatatatacattatatatacatatacaatatatatagattaaatgtatcagtgttttgcctgcatgtttatatgcacaccacatgcctgcctggtgccctcagaggtcaaaagagggcattggctcaccttggactggaactatagagagttttcaactcccatgtgggtggtgggaagcaaacctgggtcctctgccaaagcaggtgctcttaacctctgagctatctttccagctgcataatgatttatgtgagcaccagggatcagaacagaggtcctcatatttatgaggtaagcactttatctactgagccatctccccagccctgaacatctctctctctctctctctctctctctctctctctctctctctctctctctctctctcaaaaactttgagaattctagatatttttgtgtaatttcttatggaaaccattcctgtggtagcactgagtgccatgaggataggctgcaccctgacatgttcatgtcaactctgctttccttactgtccaatgatggccgggcattttacagatagaggttgaattctcttaagaaatagtgtgccaccagtggtcagtgagaaatagagctaggaggcaaatgaaattttaaagatgtatagtatagaacaaggcacctaatgatgttagaaaaaccaaaggcaagacctagcaagtcacagctttcagcaaacttctctctgcaacaggagaaggttgttgcaaagatcttgaaatccccttacaattccatcattatacatcaagaattctggggggaaaaagacctactctctcctctcctctatctctctctctctctctctctctctctctctctctctctcacaaacacacacacacacacacacacactcactcacaagtcttttttatcctggggtacttttggaaacaagaaaagttcccaaccaaagatatgcccactaccatgtggattgaaaggtcaccgggtatcagcagacccaagcctgagagctgggttccaggttatttccccactctccagagtgcaacgctctgcactgcagcatgactactaattctgtactgctcgagttgtgggtgtagggtaaaaacaccactgtgtttcggtgaagtcttctcccgtttgatggcttgctatggggatttcttccttcaaactgtgttcatgtctcgaaaaaggagtgggaatttatctctttcttctctttgttttgagccattccctctgggggagggagggaagggagagtctttattcaatgcattacttcaaaaagttatagatcccagacctgagatgcctctgtggttaagagtgcatactacttttgcagtttggttcctagtacccatgctgggagacttaccctgcctatttgaatccaatgacctcttctgtcctgcatgtatggatagacacatacataaataagaccttgctgtcctggaaatcaacctgtagattagaacagccaccacctcagagctccacctgtctctgtcttctgagtgctgggcatgcaccacttctgcccagtgatcccaggcctcttgatgacttgattacatcttctgtatgcctttattctgattctcagaagtgatatctctttatccatgcagccagccattcatgcattaggattatagaggtggataaaggtacagtccttgttctccaacatgaagactaaacatctgctgattgattctgattaggaagactgctaagggaaaacttgcatctgccaatgagtcaacattctgttccctttccaaccctctgccacattttcaaggacatcacccatttgcagggaaaactacaactaagtgatctctgaagatgttgggtgttttctactctaatgttgctcacatcttttttggctagttgattttatggtcattctagattttgcctttatcaacaagacaacgcaggtctcaccgggagctgtctgtggaatcatgtttcccaaccccagcttcagttacaacatgcatctggaatggctgagacttcttcagaccagtgaagtcagactctcaggggagaagaaccagacgtaccaatgacattatttttatgtccccccaaacaatgaagatgcagtgaggaatgagatccgtctaatattgtagagaagtaatataatggaataatcctacagccgggcatggtgtacatcgctgtgacccttgcttgcacttgggtgattggtgcaggaagattttgagtttgaggccagcacagagctccacagtgaaactattttaaaaagaacgaacaagaagagaaggaagaggggaagggagaaagggagggaagggaagaagagaaacgcaaatggtttttcatgctggttaatttcattgcttcatttttattctttgaaaatagaggagaacttctcaaactttacaagactcctggggattttgttataaagcattctgttcggagagggattcggtagcttgaaattctgttcaaacaggctccaacacgagatgtgtgttgtcagtgcatgggcccagttctgagcagcaggctatcatgtaacaacaacaacaacaaaaaaatgcacactatgtaaccacacagaggtttcaactaaaatgggagacaacttcagagaagattaaatattgatcaaaggttgcacagtctatataacacagcctataaatattataagtggtcagaataaagagagcagcctactgcctgggtaattaaagatgatgctttgagaagggcttttggagaacctagctctgaatgatgcttaagaataacagagcattagccgggcaatggtggtgtacacctttaatcccagtacttaggaggcagaggcaggctgatttctgagttcgaggccagcctggtttacagagtaagttccaggacagtcagggctacacagagaagccctgtctcaagacaacaaaacaacaacaacaaaacaaaacaaaacaaaacaacagaaaatgttagaagacagtattgtgtgatgattctgccaaagctgtacacatgggccattatccgtttgcagagatgtgtgtctgaacaaaatgattttcaagtgcacagtgtttctctgataaaaattaatactttccccacataaaaaaaaaagctgaacatggtggcacatgtttgtaatcgcattgctgggaaaacagagatgggtagatcgctggggcttactggtctaccagccaaatcagtgagctctaggttgttgggaaaccatatcccaaaagaaaagatagatggtatacacactacacacacacacatatagtagtagtagtagtagtagtagtagtaataataataataataataataataataataataataatgataatgataatgataataataataatgattttgctcaggcataagactttgcatgttccccatcctacttaaatcctccagtgcccataggcattagttatctctagtagatttctttgacatgatgaattactgagtagccttgccagtaccacatgacaccctggatatagtcaaagaattttttagttttcttctacctctacatctgtgtttttaactatgatgcagtcctgttaacctcataccacaaggtcagaatcccatggcttctaacacgacagcctccttttaccctgccagttcactaggcttcaaccagcaactctcaaggtagcaccagacatcctacatgcaggaggctgaggctcacatgactggactaccaacagtaaacggtttcacccaaaagaagcactgtttttaaatttttatttatttatttatttatttatttatttattggtttaaattttttcttttcttatatgtatgggtgtatggatatttgacctgcatgtatatatgtgtactctgggcatgcttggtgccaaggaggccagaataaggtattggatcccctgaaactggaattatggaaagttgtgagccactatgtgggtcctgggacttgaactcaggtcctctgcaagagcagcaagtgttcttaagttgtgaggcttctctccagttccagaagaaacatttcaaacagtgatgatgatagcgagagcttatgctcactgtctacatgccatctcttagtattgtgttaaatcagtgtctcttggttcagttttcaaaataaggtagttgtgttgggcattgtggtctatgcctttatgttcaacacttgggaaacaaaggcagcagctctctacacagtgccagtctcctctacacagagcagtgttctcaacctaacactgcagccctctaatgcagttcctcacactgtggtgactccccaaccataaaattatttttgttgctacctcatagctgtaattttgctacttttatgaattttaatttaaatatctttttttcccaattgtcttagcaacccacaggttgagaattgctgacacagagagttccaagccagttagggccacatagtgagctctggaaataaaacaacataaaaagcagttcttattatcttccctttgcagttgaccaatggagtctttggtcagttaaatcagtagctggtgtaacacaactaggaagtctctagaatctgagtttacagaatctctacccaccatcctgagccatgaccaccttacacagcagctccacagtctacctgaatggccacctgttgaatctcttgtctttacttttgtgcatgtgtgtgtgtgtgtatacatatgcatgtatatacacatgtgtgtggaggtcagagcttcattcacacgacatcttcttttatcccttgaccttatctttttgagacactctctcactgaacctggagctcaccaattcagctagaccacctgctcaaaagctgcagtggtcttgtcttccccagccctctgctggggctacaaacatacatcatggtgctgggatttctacctggagggtagggaatccaagcctgagtcctcttgctctcccagacagttacacctcagcatagcctcagcctctttttttccccctgaatgtatgtagctcagggtggcttagaaattcatgaagtgattaaggctaatctcaaactcctgatcactccaccttacttacacgtctggagttcactctggtaggacctcctcaggaccctgctagtcttagatcctgtattctctgaatccttctgttaccttcaaagagcagcctggggtgttttccttgcatctgatagcatttcaaagaagtcacagcagcagagtctgggctagcaaccggcaaaacagaggaaattctgagcacctttggccatgagtcaccacaccttctgagcacctttggccatgagtcaccacaccttgttcaggaattgccatctctgcccacagaatcgcccactgttttctgtgtgggaccaaaatagatacctccttcataaactttgtgtgtgtgtgtgtgtgtgtgtgtgttctctctctctctctctctctctctctctctctctctctctcttggtaataaaaaacaaaagacaaagatgggtatgtgcttccaagggcagactaagaagccacttacaggtgagtgtgacaggtgagaggaaccgtggcaaggaacaccctaccctggtggcagagcttctcgatatttgtatgtctgctgctttgcttctcagttcattcatgatctattgagcaacttcacgcaaggttagagaggcagagatgaataagacccaactcttggcctccaggagcttcttgcttatgcggagagaatacccaagctaagggctgagatttaagtaagagcacagagctggtggacacacactccactgcccactcctcctgcaagaccgacacaccataagctaggaactgcttcccattatatgtacatgcagaagagagaagggctcacgctgttttgtcagtgtgagtgactagaattagaatccagcactttccattttgagtttagaacaatctgcagaggttttgtgcttgtttggctcagcaatacctttcagggacatctcaggtaggacgtactgggagtccttcagtaacagactgtttccacaggctcaggagtctctgaggcaccatctataggccaactctcacatgtctgagtannnnnnnnnnnnnnnnnnnnnnnnnnnnnnnnnnnnnnnnnnnnnnnnnnnnnnnnnnnnnnnnnnnnnnnnnnnnnnnnnnnnnnnnnnnnnnnnnnnnnnnnnnnnnnnnnnnnnnnnnnnnnnnnnnnnnnnnnnnnnnnnnnnnnnnnnnnnnnnnnnnnnnnnnnnnnnnnnnnnnnnnnnnnnnnnnnnnnnnnnnnnnnnnnnnnnnnnnnnnnnnnnnnnnnnnnnnnnnnnnnnnnnnnnnnnnnnnnnnnnnnnnnnnnnnnnnntccccaccgtccaggatggccttaaactcattatcttcctttctccaaatcccccaagtgctgggattacaaagtatattatcagactgttttttgttttctgtgatgctaaggattgagcccagggttcaattcacactagacaaaacactttacctctgagctgggtccccagttcttactatactgtataaagccgaaaagaaaagcagtgctttaaagatgtattaataaactataagaataatacataataaattgatatgtaaaaaaccacaatgtatatatgtaaatgagagcagccctaaaaccaaacaggcctgtgtccccagggaaaaggtcactttatcatgttgtggggaacggcaaaagaaatgtttctaaaagtttcttttgaagtccccgacatctatgctgacgtcagcctcttcctgcccagcgctctgaaagtttccagggagttttggggccagtgacttgacacagggttgtatgtttgacacttgctgactgtgggcaggttgtggtggctttccctgcctgccaagccccactcagctgagcatcagcatggtatgtgcttcctgtccccgtgctagtgacacctctctgttcagaccttgatttagaacaaaaaagaacctttgtgaagagaaaactccttatttaaaggaaagtaaaccgaacttttgagagtctttttagaataaaagggcgagtcctcaggagtcccgctggtacccctgaggggaggtgagccttgagggctcgctgctaggtttccctgtctggtcccagacatcactttccctttctaactgtctcctcagaggccgcttctggaggtaatttttagctgccaatgctgaggaactattggccagagcatgccaccctgcttcttagagaatacaactgccaccattgaaaacctaggctgtctaaccagtgagctcagggcgtccgcctgtctccacctcccttttcctcctgtgctgggatttgcatgtgcacagccatatagagtttatagagtgctggggatgtgaactcaggttctcatgcttctgtggcaaacccacgaaaccatctcccatccttagttttatatatttcactatacattcatattataatatacattatatattatataatatatattatataaaacatatgtaatatatattataatatataataccatggtattggcagtgcttagaataggtgccccagattttcgtaactttttctttgttttctgtttctcttctaatcttttttttttaagttggttattttatttttttacatttcaaatgttattccccttcctggtttcctctccgcagcccccacaatcccatccccctcctccctgcttctaggagggtgctaccccacccacccacccactcccacctcactgccctggtattccccttcactgggcatcaagcctttactggaccaaaggcctcccctcccattgatgccagataaggccatcctctgctacatatgcagctggagtcatgggtccctccatgtatgctctttggttgatggtttagtccctaagaactttgggaggtctggttggttgatcttgttgtttttcctatggagttgcaaaccccttcagctcctacagtccttgccctaacttttcccctggggcccctgggctcagtccaatggttggctgcaacttaaacagctgtcccacaccatggttacttctccagtctttaattgcatttgtttaacaatttattttaacaatttattttcttatgtaatatatgtgtgtgtgtgtatacatctatatatatatgagagaagagggcatcagaaaacagagggtatctgatccctttacaggttgtgagccaccatgtggtcgatgggaattgatttcaggacctctctggaagagcagccagggctcttaacagttgggccgtctctccagcttgtatttgtttgtttacttatgtattcatttacttatagacagggtccagctatgtatcctgaactgacttgcagtgtagctaggctggcctcaaactcatggtaatcacctctgtcagccttctgagttctgggactacacatgcaggggaaatcccacagatatccatttgaaacaagccctcacgattacaacttgcttctcagaaggctctgtcttttttcagaagactgtgggcgggatttaccaatttagcagtgctccgctaaaaatatggccccctcccaagaaatccgtttctaagatttgaggggaaaactgtctttagttttcagagaaagaggaggaatatttcttcccagacttttctctctctctctttcttttttaatctgataacactttaatttaaatcaagttgacattctgtggtaagtttgtggttaactctttcaagtgctgaagcttgttttctgaggtgactggagagttagaaaaagacaggcagcccaaccactgtactctgtaagcattacaggctcctggatgtgacaatctagaggccgctctgtgagacagagggcagttctcagctccttgcctgggtttctctttctaagagcaaattcctagtttctgtagacctactgtttgttgtttgtgtaactactgccaagaaggcacagggttttctccaaaatggtcttactagtgagtcacacattcctgccttatggaaacccaggctttgacgaagcctgagagaactgggcctcagaaacgtgtgtcagatgacaacaggactcacagacacaaaaggctaaccaccgttctgcaaatattgttatttcagtgtttcccctttaattttaagaaacttttctttaataatgacacacacacacacacacacacacacacacacacacatttttgacagggtctcactgtgaagccctggttgtcatggaactatcctggaactcattatagagaccaggctgggctagaactcagagatccacctgcctctgcctcccgagtgctgtgattaatggaatgtgccaccatgtctggctttcatgagtattctttcaatcatctttggattcatttcctgctattggcatggccatataattttccacctttaaacagagtcatatcaagagattttccactagtgaaccatccatcactgctgagataaattctaattgatcagaatattagtttttgtcatacctggctagaaccaagtacaaatattgtaatcgatattctgttgtctgtttttataagtgagatggtcttacggccattttctctgcagttcatcccaagtttaataggaagactaacataactctgtaaaaggaattagaatcattgaagtgtctgtgctggtctgaatgagaatagctgccataggctcatagatttgaatatttagtccccagtgagtggaatttccagtttgggaaggattaagaggggtgacctttattcagggttttgaaagactcatgtgatattccagggttgttttctctctctctctctctctctctctctctctctctctctctctctctctctctctctctctctttctctctctctctcatggctgtggacagagatctgagctgtaagctgttcctttactctaccatcatggattcaaactccctgaaaccatatgccaaattaaatgttttctttgtaagtcctggtaccctatctcagcaatggaaaagttaactaagatgccctctgaaacagtttgtattaagcatctgctacctatttcatatatttgttcacaagttgattttttcaaatgattggtttattaggtataattctcctctttcttcagcttctttctctctttctaagacaaaatgtcgccatgtacctcaggctgggcttgaactcacaatcctgctcatttttgagtttttggtggatcagtagttacacctcccttttcttcaaactgatgctctgttgttcttgctccttctagtcctgactattttcagaatctacttaaatgaatagtttttaatttggaggacattctctgctggttttttttttttcatcttggtcaatctttcatttacagttttgatctcctttctttaacattattccatggttttttaacttcctccagtaaatattaaatgggataatgcctgttctttgaacacgtattttcctttgaggttgtagacatccctggagaggctgtgctggctcagtactgcagggtttgtggttatcatttttgttgctattcggtgcagaatattttacagaatgagttctgagtttccctttgatccatggatttgtttggaagtttgaggtttcttttttaaaatgtgtgaagttttattgttgtttgtggtttcgctctctgtttttaacttttaatttcattgcgccatgattagaaaatgaatctgtgtgatgcttattctttgacacttgtggaaaccacctctggtgcctagtaggagctcagttctctttaccactgtcccatgcgtgataaagagagtgtacattgcctatgtattggtcacacaactacataaatatgcacaaatcaagcttactgacaactaacagaccttcttatagagtaaccttttcttattagtggtccttgcaacatcagtttgttttgtagtgagttctgggcttaattctagttgggttactttttgtggtttcccttggcttcctgagctgtatttggtagcatctgattggctgacctgcttttactataggattcccatgagtgtggtctctttgatagttcaggagttgtgttctagacactgcagtatgtgaaatgtattatctttggttattgccgtagagtctgtgttatgtaacttggaagagtgtagggtgatttacagcagtgcctcccttgtgtggagacagcacagtgtgttacctctttctgttgttacatccagtgttgagtcttcagccttgatcctaaccccactcactcccctgcatcttgggtcttttgtctccttcattattcatgttgagattttgtctaagtttgaggaggactaagtaatgaatggaatatggtataagttctctcatctgggatggaagtatatcttacctcctaccttgtgtgttcacagtgttgggcttgatctccagaatcaacaggaatgtcaatggttcagaagcaaatatgttctacaacatttatttgcgtttatacaataaaaccctactcaagtaacatctacaacaccaatgaccgtaagaaagtgaggagctaaaatcaaacacacagaagagatatataataatgaaagttacttatgcttataatatttctaattatacttataataattataagtatacttatacttaattatacttatgttaattctactttcattatttaattatttaattatttaattatttaactctactctctctataaaggcccgagttagattattaataaatacaactagataaaggagtgagaaaagactaatgatgggacacaaggcaaacttaacaggcaaagttaagcaagctgaagcttccctcttgcgtaggtgatgaagatgcctctttccccagcttctgttttcagagttcactgtgcttgtgtgtgtgtgtgtgtgtgtgtgtgtgtgtgtgtgtgtatgtgttatggcatgtgtttatgtttgtacatgtagtgtgtatttatgtggtgtgtgtgtgtgtgtgcgtgcatgtgtgtgtgatatatgtggtatgtgtggtgtatgtggtgtatgtgatgtgtgtggtgtgtgtgtgtgtgtctgtgtgttgggggtgggccttgtcttctagtcaaacaggtcaaaccaaacaggacagcacctgtttggtgctgtttggtgccgacagagactcggttccagatgccttgacaaagtcactgcaaggctatattcacacccctgagctaccctagcaaatcccaggactctgtgaggtaggagtcacaaggatgctattcttggtatgttttgtgatgcagcaggaggggttgctttagcaggcccatggtgaggcatcccccacctctggtatcagccgtaggacagctctagtataaaatggagtttatttgggacatgggagtagaggcagaggaaggaaggggacagagaagaacagaaagagagaagagaggaggagagagaaaaagggaagaggccttccaggaacatgctgagggagtgggagagagagagagagagggagagagagagagagagaacagggagagagaggaggagaaaggaggaagagggagggagaagggggaggaggaggaggaacaggaaggagagagaggccaaacaatcctttttatagcaagtcaggctagtacctggctgttgctaggtaactgtcgggcagagcctagaagaaaggctaacaattctcactggccattcttgtccctgtgcctgcaggagtgaaaaatgcccatgtcgttggctaatcctccaactgtctcagaacctcagagcaggagaccatgaccaagccaaagcatttagtgctgaggtgcaagtgaggggtcatcactgactgactcattgcctcctccaaatccccgacagctgcccttcccctgcttattaataagcggcatgtagctaggcataatgctggagaaggagctgagaggttgacgtcttgatctgcaggcagcagaaagagatgtgtgtcacactggtcatagtttgggcatatgtgacctcaaagccaaccttcaaaataacacacttcctccagcaaggccacacctcctaatagttccactccctatgggtctttggggggccaattacattcaaactaccatagtgccttggtcagggtttgtattcccacacaaaatatcatgaccaagaggcaaattggggaagaaagagtttattcagcttgcacttccatactgttcttcatctccaaggaaagtcaggactggaactcaagcaggtcagaaagcaggagctgatgcagaggccatggagggatgttacttactggcttgcttcccctggcttgctcagcctgctctcttatagaaccaagactaccagcccagagatggcaccacccacaatgggcccacccacccttgatcactaattgagaaaatgctttacagctggatctcatggaggcatttcctcaagggaggctcctttctctgtgataactccagtttgtgtcaagttggcacaaaaaaccagccactacacacagctacccttaatatccagatagtttctcactagtgtgactcctgtgtgcttgcctcctgtgtgacaattaaaaaggaccatcacgctaacctactatatgcaagggagtgcagtaaagaaacagctaacatgatttctcccatggtgtggttaaagtttttactgtagagatgagaaaaagcagagaggaaaagaagcagactgatcatggccaggacaagggaagcaggagagaatagtagtgctcgggagggaccaagagatagacgacagagcctagtaagagagggtaagtgaatagagagaaagagcaggaatagtggagaatagtgggttataaggaggctgcataggcagggagagggaacagcctggggactgtcacggtggctttgaaacatataacattgttgaaataattaagtaataagttaatcccagcaccggttacttcccacctcaatggtttatgttcccgaacaaaagatatacacacagtctttatattttaatatgccttaaacagcacaatagctgggtcactgccaaacctccatgaggttaatcctgaattattacttactaattctgtgttctatcttggctgctctagaccaagttgggcagccccctaggccatgctctcagtttcttcacaagatggctatgcctctctgttctccattcttccccatctctcctctcctccacactccccctacgtggtggatcatctctttctccctcctcagggtcccaagcctggtaatctttaaatcctgcttctgtctgtcctcttcagccattggtcattggcatcttaatttaccaatcagaatcaactatatgtaactttatatatcagtaaacaacaaaacaaaacaaagcaagattgggaagtaatctaagcagccattaagacttgtggaggatttgtagataataaagcaacaagagattatttcaagggggggtgctcatcttcccgccctttccagcaagagaccctccttgtagtctactgaacacagcaatgcatttgtgatgattaatctccttgttgacttgaggagggttagagtcaccatgaaagcaaatctcaggcatatctgtgagggacttttcagattaggttagtaagtatgaagactgaccctaaagtgtgtggtgtcatttccagtagctgtagtcctagttggcattaaaaggagaaagctagcatccatgaaaggatggatctctagcatccatctctctctgattcctgattatggatgcggcatggtcagtggcttcaaactcctgctgctgggacttccccccatgatggactgcacctgagccaagataaattctttctttctttctttctttctttctttctttctttctttctttctttctttctttctttcttcttttctttctttctttctttctttctttctttctttctttctttctttctttctttctttcttccttccttccttccttccttccttccttccttcgcttttgttgggtattctgttacagcaaagaagaagttggtaggctgtgtttcacaacgcctatgctaggatggcttgttttgtttgatctgaacacccgtcaagccagggtaaacttgaacctggctatgaggcaggggccaggattctccccaatgggcaccaatgtcaaaagcccagaagcacaaatccatatggcgaaaggcaatgtcttagagagtttgggatgctgttctcatcatatcgctgattgacggttcaaggaagctgccacatgctgtttgattggcatttggatgcttaacataaagcaataacaaagtcaaccttacttgccaagaacttagcatatgttagacaaaaacttcctgggtcaaaagagagcaaagagagggttcctatccggtggttaatcacaaagcagaagggcacattgggtttcacttccggttggtttgttcagatggtattatggaggcagttgatagggtagagagaagtggtacagagagaaatggtgagatgctgttgccacagaggtggacagttgctgagttgtatgggagtcttgaacgttagtggagagggagtatgaatgccagagtattgtggctcttgggaactgagcggacatcaagaatcagaaacatgtggaattggctcagatggtgacagtcactaagagaagcaggtcagaaagggaacagggtggtttgtatgcttatttctagctttttgtttcaagagcattggagattcacactctgtcctcattctctttgttctgtattacacagtgagttttctatttaaaataatttcacgaaggtaaaagggaatttttaaaaaaaggataaacataaaggcagccattagactcctggctttcagttccccccactatgaaaatgcggtttgggtagcctgacctcttgggacctcagtctctaactgtatgaagccagttgagaatatcttccctttgtggctgcacagagcattggaggtaatatacacaaagtggagttcagaaattaggtctgttattacatatcttaaaaatccaagcagagggacctgggtgctctaacttcacagataatgatctgaactgaaccacaacatcaataaacactgcctggtacccagatggcttagacagatgagacatctccctgaaagtgacagctgtcagatggggagtgggggcaacctgtctcctggaggttacatctctctgacatggaaggaagatttctgaacttggagaactcagggttttccacaattcacagaaagggcgcagaaagatcagtttcttttttatgagtctatcactctcagagcatttgatcatgttaaacaatattcatcatgttctactgaatcgtctttcacatacccaaacacacacacacacacacacacacacacacacacacacacacactttctgtaaggcccaaccattgatttggtctggagacaaccctgaccttggctttcttatctgatctgatgaggaagaggatggctctcaggcaaaagccagactgttcatcaggtgactcacactcttttttcttttttcttttttcttttttttttcgagacagggtttctctgtgtagccctggctgtcctggaactcactttgtagaccaggctggcctcgaactcagaaatccgactgcctctgcctcccgagtgctgggattaaaggcgtgggccaccacgcccggcgactcacactcttgttacactcatgagtcccttatatagttcagtcaatacctgtcccgcagacaccatgcttggtgagtgttttctaacctcccttctcactcccagtatatggaaaagcaggaggcagcagggagaagaagcccttactcagcgttggctgagctacagacaaaacatttccttaacgactcctttctcaaactctgtccactttcttagggagccctcctttggagtcatttacctagggcacaggagtccctatcgttctcatcttaaatatcatagataaaccaacgctactgtctcccagcctacctttcctcgggctaccgactagatcccgagtaaaaatacaaagcactctgaaggcacgttccaaagcacgaagggtctgctcagtgtgcgctggaagacaagagtagctgggcagggagtacagacagaaagtagggtgcagcagccagaagttccccctcaaccttaactatctgctgtgtgacagtcgacagaaagcatcagcaccgctagagggctcacttctccagcccagtctgtctcttcaggaggtttgaatgcctgccactgggagctctctggtcgtcctccatttaggggcgctgtcttattgataaaagaaccacttgcctcccgagaacgcttcaactgtcaatattgctgtttaattcaaggggcacagaagaattcaaggcacaattaattctagtttcattttgtttctaaaaataaaactgttaaaaaaaatcaaggggaagcttttctatctgaggagtggaggcgaagccataaaaccatgtaaggaggatggcagttagggtaagaagtacggagccatgtctgtgctccttgatcttgttactacatatagaggtctcttcctgggagcagaagggtttggcgagaaaagcacaaatgacctcatcccacagcaaggctctacccctaaaggttctgcgatcatcccaaacagcgccccatgctggggaccaagtgttcaaacataggtgcctatggactgacatccacattcaaaccacaacaagcacctttccctacctgccctgtgctgcagcccacagggaggaggctttgtaattcccagagtattcgctgaaggagtcacaagttcccagaacgtcttgtattccatttttcctggagacactagatccccagataattgctgcattatggtcttatttcagggagagtgactggggagagatttggcaagcatgggactacccctcatacaagatgggcaacatactccatcctggaagagtttggcgttaactttcccagtgtaggtctctggtctgaacccttgtattgggttgattaacaactgctggccgcttctttggccctgtgcctacatgaaaggcaaaaccacatccaagtacctcggagtctgagataggagtctcccaggagccccatatcccaagaattaaggtggaaaaaggctgggaggtgaatttgggagaagtggtttgggagtattcaggaggtaaaagtagagagggaagacgccagtcacctgaagtcattttagacaataaattaggattccttttttaagttgtgtacatggaattctccttcatgacctcccagagaagcttgtaaacaaattatttttactcatttttggctgttgcgctgatgtttcttttatgacaccagagcaacaagagctaagaatatccccaatttactcttaagggattaaaaagaataaaatctctagggctgcctttcccatgggctcttctgccttggagtctttgaataagttttggaacacatttggcaaggcctttcagggagagagaatcataagcaattctgagaaaggttcttttagaaatggaaaatctgtgagagtacaaaattctacaactgtctccgtgaccccacatgacctccttggacactggactagttccggatgactgtggaaatttccatggcaaagccttgtctagaaaaacatcaccgaactctgaggaatgcttaggggtgcaatgtcatcccaaagaaaacttatctgacctttcttaaagttatgcatgtgaaaggtttcttagcttgtggtttggtaccagattccaaatatgatcaagatgaatccctgactatttgcactgacgagtagttactcaagaattgctaaattaattggttttgtttcagtgaaattagctatagaggagttattcttaaaaggttttatttattattttaatgtatttaatgtgcgtatctgtgcctgtgtgagtgcatgcacacttgtgtgcatagaagcacatgcctgagtgttattaatgtccataagatattccggtgtgccattctgcctattcctttgaggcagagtctctccctgaacctgaggctcagactctctcagctagtctggaagctagactattcgagctgtcttcctgttcctgtctgcacttcccctccgggctagtgttccaggcttttgcaggaagcccccatcttctgcaggggccctggaatccaaaatctggtccttgtgattgtggggccaagagcaacagcggatctgtctttccagaccccaaacatgcaggctttattttactaatcactattgtgggggtggtcattggggtgtgtgtgtgtgtgatgtaagaaagaccttatagggaagctatatgaataggtctgatgcaacttgatgagttttgacaactgtgcgcaagaatatgaagaacactcggttgtttttttttttttgctgtctccttcgagttgacgctgcctactacaagaaaccactggcctaatttctctctgtttaagttctctaccccctctccctctctctccctctctccctctgcccccccatttacatctaagtgaatcatgtaagtgaagtcatgtaagtaagtatgactagcttctttagtttgtttttttttggagatttctctatgttgtgtggcaggaattcgttcttttgaatgctttggtgcatttttgaatttatactctattctcacaatgataggtacatatgttactgggttggttttgttgctttagagataaggtctggagtagcccaggctggtatcaaactcataactctcctgctccagcttccggagatctgggattataagtatttcccaccatgtcccaacttgggttcgttattaattagaagtctgtgtcaaattctctcttggtgcacattatttcactactctgagacaaatacttcagggtggaattgctagacaggtgtatatttaacagtatctgaaatatattctttaaattattttagatttatgatgtgctcatgagtattttgcccacataaatatatatgcaccatactcatgccgggtatttgcagaggacagaagacagcatcaggtccccctggaaatggagttacagagagtcttgaaccacagtgtgagttctagaaaccaaatcttcatcctctacaagaatgccagctcttaattcctgagccatctctcctgttccattttaaataccttaaaccattggttcaaaaccttcctgatgctgcgaccctttaatacagtttctcatactacggtgagcccccacccataaaattagttcgttgctacttcataaccataattttgctactgttatgaatcggtatgtaactatttttggagctagaggtttgccaaatgggtcacaacccacaggttgagaactgctaccataaacagtttgcccaagtaattttatcttgtgctctcaacactatataaaataattccagcagctcagattccccttcacatttggtgcagatttctgtctattttttttttttttctatttcacccatcctaacgggcaaattcatggtggttttcaatttgtgggtttttttttcccttgaaaaagttatttattatttgtgtgaagtgcataagcacacacgtgtggaggtcagggagcaactttcaggagtgggttttctccttcatccatgggttctgttcagttaacttgggccatcgggtgtgggggtcaagcacacctagcttgcctctctctctctccccatctccctctctccctctcttgctctctccccctnnnnnnnnnnnnnnnnnnnncccccccccctctctctctctctctctctctctctcgtcctcttcccctctccccctcccccatctctccagtccgtgtattttctttttttctttttaaaaattagatattttctttatttacatttctttttttcaaatttttattattttcttcatttacatttcaaatgctattccgaaagtcacctatacacttgccccaccttgctcccctacccactcactctcacttgttggccctggcattcccctgtactgaggcgtataaagtttgcaagaccaaggggcctctcttcccaatgatggccaactagaccatcttctgctacatacgcagctaaagacacgagctctgggggtactggttagttcatattgttgttccacctatcgggtttcagatcccttcagctccttgggtactttctctagctcctccattgggggccctgtgttccaacctatagatgactgtgagcatccacttctgtatttgctaggcacagcatagcctcataagagacaactatatcagggttctttcagcaaaatcttgctggcatatgcagtagtgtctgcatttgatggctggttatgggatggatccccaggtggggcaatctctatatggtccatcctttcgtctcagctccaaactttgtctctgtaactcctttcataggtattttgtttgctattctaaggaggaatgaattatccacgcattggtcttccttcttcttgattttcttgtgttttgcaaattgtatcttaggtattctaaatttctgggctaatatccacttatcagtgagtgcatatcatgtgtgttcttttgtgattgggttacctcactcaggattatatcctccagatacatccatttgcccaagaatttcataaattcattgtttttaatagctgagtagtactccattgtgtaaatgtaccacattttctgtatccattcttctgttgagggacatctcggttctttccagcttctggctattataaataaggctgctatgaacatagtggagcatgtgtcctgattactagttggaacatcttctgggtatatgcccaggagaggtattgctggatcttctggtagaactatgtccaattttctgaggaacctccagactgatttccagagtggttgtaccagcttgcaatcccaccagcaatggaggagtgttcctctttctccacatcctcgccagcatctgctatcacctgaatttttgatcttagccattctgatttgtgtgaggtggaatctcagggttgttttgatttgcatttccctgatgattaaggatgttgaacattttttcaggtgcttctcagcccttcggtattcctcagttgagaattctttgtttagctctgcaccccatttttaatggggttacttgaatttctggagtccagctttttgagctctttgtatatattggatattagtcccctatcagatttagggttggtaaaaatcctttcccaatctgttggtgtcctttttgtcttaatgacagtatcttttgccttactgaagctttgcaattttatgaggtcccatttgttgattcttaatctaacagtacaagccattgctgttctgtttaggaatttttcccctgtgcccatatctttgaggcttttccccactttctcctctataagtttcagtgtctctggttttatgtggagttttttgatccacttagacttgagctttgtacaaggagataagaatgaaccaatttgcatgattctacatgataactgccagttgtgaaaatgctgtctttttttccactggatggttttagctcccttgtcaaagatcaagtgaccataggtgtgtgggttcatttctgagtcttcaattctattccgttgatctacctgtctgttgctgtaccagtaccttgcagtttttatcacaattgctctgtagtacagtttgaagtcgggcatgatgattccaccagaggttcttttattgttgagaatagtttttggtatcctaggtttttgttgttgttgttgttattccagatgaatttgcaaattgccctttctaactcagtgaagaattgagttggaattttgatgtggattgcattgaatctgtagattgcttttggcaggatagccattttgactatattaatcctgccaatccatgagcatgggagatctttccatcttctgagatcttcttcaatttctttctgcagagacttgaagttcttatcatacagatctttcacttccttagttagggtcacaccaagatattttatattatttgtgaagggtgttgtctccctaatttctttctcatcctgtttatcctttgtgtagagaaaggccatttgttttagttaattttatatgcagctactgcactgaagctgtttatcaggtttaggaattctctggtggaatttttggggttcacttatatatactatcatatcatctgcaaatagtgatattttgacttcttcctttccaatttgtatccccttgatctccttttgttgtcgaattgctctggctaggacttcaagtacaatgttgaataggtagggagaaacgtgtattttcttaacagcttggtgagtgccacttcagtgagtgtgtgtcttcaataatcacaatattttctttggaaacatgactattcgagtgtttgttcatctatcgattcagttgccctttagtgttgctatgtaggtttttgtgtattctggaaacaaatattgtcatatatacattataaatggttttctcacagcctgccacatctcctccattttctcatggtctttggattagctgatacttttgtaattttttttttcttttataaaatctttaacctggagcagggcatgggagggtggactcagaccctctgatgctggggttacaggtgcttgtgagctgcttggttcaggtggctgggaagcgaacattggtcctctgcaaaggtagcaagcattctcagcaactgagccatctctccagcccccttttccttttatattcagtgcatgctctgtcctaagaaatcttcacctatccacaacttctaaagctgtctgcctttatttccttttagaagttttacagttttaattctatgattgcatgtgatacacacacacacacacacacacacacacacacacacacacacacgttcttattatggaagagaaataagttttctctgtggaaggaagctcttttcccttttcacatttatccacacgactcaagagtatttgttgagaacgttgtcctcttttcatgaattgctttggtaaatgggggggggggcagtaattaaatgttcctgagtttctagaatgtatattctgtcgctgtacttgtttttctcccagttgcttgctgtcttgatggctagctttatagtaacagatgttatgagtctcctatcatacactttatcttacagttatcttagatacttccaaggaagtttgaaaacaattttccaattttactaatatgtacatcaaaccagtgaattgaaggtaaactgacatgtcttttaaaaatcagccctccaatttataaacagtgtatgtttctctgtttatttcacttaaaaattttttctcagcagaaattcttttgcaattttcaagtctgttcttgtaggtgtgggtgaatttattcttgagtattttatgattctgatgtgtaattacaattaactttagatcttaattaattcattcagtttaaatatataacaagtgatttgagatagccacacctacctacttacatacgccattatgtagaattctcggtactttcatggaaagaggcatttttagctgtgttaagtgccctttcccacaaaactactttctgatagtaacatagcccatatcagctttcctatgcttatctctgcatatctttttctattctttcactcaattcattttggtttttatattttagcattttctttgtgagatagtatgcagttgttgtggtctgaaagtttctattttagaaaaaattgttcatttatgtttactataatcactagtagtgggttgacgttgatgtctgccttcttgctctttcttcgtgcttcttcatttcacctaaacagatctgtttaatacatattggaatgttctgtttaatttattctgttatcttttaatgtgtgctcctggtagtatttcattattgggtgccttccctggaatatttactatgcattcttaattttctatgttctatttagttagcattgtaccatttcagacatgctagaaaaatttaaaaagctaaaggcccatcaacctcagctttcttgcccaagttgtcacgttttacatttaagtaggtactaagatctgtcctgtagggaccagcacggtggctcagtggctaagaatgcatgcacactgctcttccagaagatctgagtttagttccaggcactcacactgtacagctcacaatcacctgtttctgacgccctcttctggtctctaggagaactgcactcaccccctcccctaacacacacagttaaatcaaaaataaataaaagacctaccatacagtgctattttttttttattttagacatctctttcaagaaaaaactggaattttctcatgaatatatacttactaatgcccttcattattcccagtagatttctatttttgactaatataatttccctgggtcttgacattttgtccttagctttcttttcacttttaatatgcactataagtgtgctagtggggttttgtgaactttcttttacctgaaaatgtgctaaccccatcctcatttttgaagggtgtcacgtctaatcaggattgagctgaaagcctgtctgtgtgtctgtttcgaggctggctctgtttccctgttattttctggctccctttgctctgtggtgaagtcagttgtcatccatcactgttcccactaatgtgtgtggcctttccctctggctcctttaagacattctctttagatttttggcagcttggcattagatgcataacaatttgcttttaaaagtctactctggtgtcatgaacatcttggatctgtaagttaacatctgtcttcaagagtcagaaatgagctggcaagatgggtaagtgtgtacaggtgtttcctattggtggccctcccacatttcatccttcccaaacagttccaccaagcaggaccaagcattcaaatatataagtctatgagggacattttctttcgaaccactaaacagagggatagaaaagggggcggggactggatgtgtgggttggggtgatagatagaacatacttctttgccttctacttcctgtcccagctacatctccagctgactcttgggtgcctgcccacactgagggcggggtcttttccctattattttgctgacctgtagtcagtcttctcaggcaatgtgcttacagatacacccagaagtatgtttcaaattctctaggcatccattagagccttcagtcgacacctcaaactagccgtcatgatactcaccagtctaatgtataagcaggtgcagtgttggcctcggtgttggcctcagcatgccgttccagatggagcaggtgggcaggatggcagcttgattacaaccaccttcacacactcagccatcatgccatgacagccccctgctttcctgccactcccactccttaccatcactcactcccccctccaccccccacctgctgtggtagtctcctagtcacctgatgtcttcaagcacaagagcttgttgcaatggaatggttttcacttacatcagggtccctcttcccttcaagagtcgggcatagagagctggctgtggcagtgtgcacctgtaatcgaaagacttgggactgaaagcaggatggtaggagttcatcctcagctacataacgaacttgagcccaattgggcctacaggagaacactccctctcaaaatgattacatgggaacctctatttctggtgatcatgctaggacacctgacctgtctcagaagctttggcccacccaacctctctcctgtgtatgctagacacaaagtaccttcagagtgaaattctacttatttgtacttattccttctacagtttgcattttatactgtagaggaacttgagtgaacactcctatagcatctctgacacaaatatttatctcttcagttttatacaatgggtttcattgtgacttttccatagatgcatataatgtattttgatcatattcacacacacacacacatacacacacatacacacatatcatcctctgtgctcccactgatcccgaggaggtagagtacgtaccaatcctttaaattgagagaagaagcatgtgagcaagctactgcacaatcaaactcatgtctcaccaacattctccttgcctttgcagaactgtgtctgtatgacccacccgaggtccccaatgccacattcaaagccctctcctacaagaacggcaccatcctaaactgtgaatgcaagagaggtttccgaagactaaaggaattggtctatatgcgttgcttaggaaactcctggagcagcaactgccagtgcaccagcaactgtaagtgtgacccttttgtaacctggatgggaaaggatctagagataaaaggtgacagactccagctcccattaatttgggtcaacagataaaaaatgtggataaatctatgaataacagattttaaaggcttctgtaatatccactcacctaacgttatttaatgacgtctacttggtctaagagctaggcttactaagttcttgactaagcctgagtcaatctgatagatgcacgactttgctgttggcttcccctcttcattgagttcagactgctccttcacacagcctgtatccagactcagtttcttctctattttggggtgtgcatgtattttttcattgcatatatctattatatatagcactgtgttacataagaatattatcatgcaggtataaactgtagaatgagcactttctgccctgacctgaaacagccactctcttctatattccccctcccctctgttactaacttttagattccttagacagttttctttatacttttgggttatatagacatacttatgtttagttacatagagaaagtctaggaactgcaaatgaaagaaaacatatttctctttctgaagctggcttaatttgcttaatattgttatctctaggtgcattcattttcttctttatggctgaagaaaattccatcctagctgctgagctgagggtaatggcacatgtctttaaactcagcactcagcagccagaggcaggtggatctctgtgagtttgaagccagtctggtctatatagtcagctctaggcaaatcaggaccaaataatgggatcctgactcatgtgtgtgtgtgtgtgtgtgtgtgtgtgtttatgtatacatatattaaagaaaaatccatatattccacatttgctttaatcattcctctactgttagacacctaggtgggtcccataactgatctgttgttccagtctcctttatttttgaccatgaggatggaatgggtcagtgagccaacctatgggtggagggcagagtttaaagatgactgctctattgaagggcttggcttcctcattttccaaccatgtcccttcatccaaagctggatttctattgtcctctcactgaggtgcttgcctgtaacctctctgccagtttttcacaagggccagagttttctgatcattgccttaagagcacatttctccaacttgaactgctttgaaccaggagaggggagtggaggagttaaataaacgttgtggagttagattactcctacctgtcatgtgccacactggtggcactagtgacaaggaacaaagccacttatgtttgatccacatgcacacaaggattttctaggagagaatcttgcatttttttctaggaatgtgttgtatccaatgccaatatgtatatgagtatggagaggtcagtgctagtctaggtgtgctggccctatccaagatgccctactgagccctgcctggctggggtgcctgggcacagatgacgtgctgctcaggggaggcagaaggaaaggcagaatgatggtacacagctcatcttttctctgaagggcaaacggcagagtctgggatagatgccatgtttcccagtcacctgtgtatacctgggtgccacaggtggatcactgtgagtcaggaatgtgggtcccccagtccacacttcccccttagggtgcccatatgccaggcaggaaggggaaggcagagcccaagtgaaacccggtttgattcagagtgagtgctgggacaatggagtggctggaagagagaaggccttctttagagattcaggtgtggctctttaagaccagggagatgatctttgtctcttcatactggtttatttgatggtgggtgtgactacatacactttagtcagggtgaaccagggattaaatcccttttgccggaaggaaggaatacccaggaagagcagctcattggctgatggctaagggatacctcattagcaaggagaagaattccaggtgcgtatgctatgtgactcagtggccatggttctcagtggagtgtcatggttacatattccagagcaggtagaggcaagcagggaatggcttcactcctgccattctcaattctgagattcccgggatttaagctcattcaagcttgccatttctcatgcctgtctggtaacaaggtccctcatgccctacacaggagcggtcttttgcttatctttgcacacccagcacagatatgtctctgggcaccagagaggtgtcccagggtaaatgaccgcatagacagctctttctattctgaacatttgggaacttacttgcctcatttctcccatattctccagcccatgacaaatcgagaaagcaagttacagctcaacttgaacaccagaaagagcaacaaaccacaacagacatgcagaagccaacacagtctatgcaccaagagaaccttacaggtaagacgtgcatctcagcaaccatcctctagccggctcctgggaactgagagagattagtcctgttctcaacaggcaggtgcaacccattctcctcctcctctcagatttccatgcagatgacagcattgctgattgttggcaggctcgctgcttgggagcataagaattcaactcctatagactcaattcaactcaaaaccatgtgctgggaatatctgccatctaagcaccacccacagaggaaacacatcgaatagacaagggcctctgcccttacaaattgctcctattttctcttaagcacatgccaatggacttcaagcaaaaccattgataaaaatttgccttttacagcacagagttctaaaatggtaaccccacacacttattcactacttaatgtggtgtggatgtgtgggctctgtgtctacatacagtttcccagatggaatgataatacttaaattaagccataatgtcaagaagaaagaggcttactagtgttagagccggggtttcagagatcagtgagccttaagaagaccctaatagtcttatgataaagttataaccttacaaagaacattattacatcatgtatagtccatctgaacccacagctgagtgaaccagcgaataggaagatgttccttgattaccaaagaaactaagacacagagccttgaaacggcccagctacagtcacatcacagagggaaagcaaaacctctagtccccctttcttctgagaccttatttttagctacttaagaactagtcacagcatccagtattggggtggggggataaagtccaatctagaagcattattgcaatgtgatgctttcatttccctttctttcccagctctgtcctggaatagtgtttttcaaatacatttaatgttttctctgctctcctggtatctggtgccaacctcgacagttactgaaaggtctctgttggtggggtgtcaatatttgttcttactcaaaagacaatcagatgaacttggcatggttgtacatgtctgtaatcaagcatctgggagcagaggcaggaagatgagaagttcaaagctgtcctgaattgtatgataacctcttcagccccaaataatgagggacggagagagaggggaaaaggaagggagggtgagggagggggagggagagagagggagaaagagagagagaaagagagagcgagaacaagttgcttctagctgagggatgttactttttttttttttttnnnnnnnnnnnnnnnnnnnnacaggattgcagatctctttagctccttggatactttctctagctcctccattgggggtgcaaggcagttttcaaatggggtctgatggtctatagaagtttggtgaggcctcattacagtgaacatcatcctctgtcatctttagtccttacagagaaagaaagaaagaaagaaagaaagaaagaaagaaagaaagaaaagaaaagaaagaaagaaaggaagaaagaaaaaagaaagaaagaaagaaagaaagaaagaagaaaggaaggagggggtagggagggagggaggaagagagagaaaggaagaaagaaagagagaaagaaagaaagaatggaaggaaggaaggaaggaaggaagaaagaaagaaagaaagaaagaaagaaagaaagaaagaaagaaaggaaggaaggaaggaaagagacagagagaagaaatcttggcaacttctattaacctcatatttatgggtttgagctcatgagctacatttctttttatattttttttttccattttttattaggtatttaactcatttacatttccaatgctataccaaaagtcccccatatttacccacccccactcccctgcccacccactccccctttttggccctggtattcccctgtactggggcatataaagtttgcaagtccaatgggcctctctttccagtgatggccgactaggccatcttttgatatatatgcagctagagtcaagagctccggggtactggttagctcataatgttgttccacctatagggttgcagatccctttagctccttggctactttctctagctcctccattgggagccctatgatccatccattagctgactgtgagcatccacttctgtgtttgctgggccccggcatagtctcacaagagacagctacatctgcgtcctttcaataaaatcttgctagtgtatgcaatggtgtcagcgtttggatgctgattatggggtggatccctggctatggcagtctctacatggtccatcctttcatctcagctccaaactccgtctctgtaagggatgttttataatttgtaatagtttggggtttacagaaaagaaaaattaagttcaaacaggttccatcaactataatgtttcctggtcttaaaataatttgttctgagactaaaactcagtcccagtgttgttacacaaagtgcaatgtaacagaaaatggctcaggtcagggccacccagcttcctgtgggggcagagagcttgaatgtggttcttttggggattgttttgggtagtcaggtgttttgaaaatctggaaggttctaaacctacgagtaatttatgattcagagtccgacagcatatatagttctgtctgattaaatggaaggccattgatagggaattccaagattaattcagaataggccacgatctctgcggccaaagttcagccaagcctgggttccttccagtgagtgagaagttgctgggtgtcggggatctttagaagggttgacatggtcgatgtgggtcgtgcttcagctgtggtttaatcaaagatctatttctctgagattctctcagtgactcccctcctccagacattagctttgtccttggtcagctcccccaagtcctaggctgaatgctaacaatttgtttgttcctcctcacgtgttcagcagctgtactgagaggtccgtccatctgctccacccagctgctgtgtctcagcagagtctcagggtctttgcagcatgggtcaaatgaaaagcacattccacctgggctcccggcaagcatcccctccgcacctgccgctcccactgccggtccaccttcctctgtctttctcacctcatcacctatccgacccttgtgggagtgaccaccatgtgacttttcctggggagacctgaacaaacatctggtcactagatagagcaatgactgcaaactaaagaaatgattccacccaagtatcatgtaatgaaccaatgaattcactgggcttactcttgggagcaaggatagttcaaattcagctgcttcatcagaaaccccaccccagcttggataaaaaccctcgtaagctggtttgctggaggtcccagggggaccggcggacagccccaacagtttgagtctccttctctcccgtcattgtaactgcttatgtaacagtaagagaagaggggcggtgagctgcaggagcatcctgtcatctgtggggtttgtttattttatttttctgagtcttaaagagccgctctccaattcaggaaatagctgcgcatccctgggttccatgccttcctacaatgcctacatttctgacagctggaatctatcaacacttgtaggttcagtgaaagcaaaacaagtaaataagaaccgatgtccagttttagccaccagagttgttctgggtgcaagaagtaacctagaggcatttgctgtgtcttcccaaacttgccttcaaaattctcttcctcgtccaggtcactgcagggagccacctccttggaaacatgaagattccaagagaatctatcatttcgtggaaggacagagtgttcactacgagtgtattccgggatacaaggctctacagagaggtcctgctattagcatctgcaagatgaagtgtgggaaaacggggtggactcagccccagctcacatgtgtagatgaaagagaacaccaccgatttctgggtaagttgttcctttcttgtgtccttcccattctttcctcatctggaccacactgccatgggatctgggaaagccacgtggccttctgggtctcaccttttaaaacacagaaagaacactcgaaatgctgaggttcccttaactctacatagagatggttaaaggcagggaaatgaggatctctccggtgctccgaaccatacaggatgctgtctctaggacagagtgctatcctgtgtctattgaagccagagcttccacaacttctgcccatcaccaagatatcctattgttcacaagggaaagttcagaatcacacccatgactcttctttgtacttatatgtcatttgtactgtgttccatggtcattacagtccccttaaaggtccccctgattttcgataaaaagtacaagtgtgtgggaagtgacttgccttaggatgggccttcacatgcccagtcctgctcacatgcaacctgcctgtgcagaggtcttcagccatcattgtttgaaaccttactacttccatcatcaaaaggtgctcatgagtttttctggtttctttggctactgccgtctgtcacatttcatgacttcctctgtggttcccttgggatgctgtttgcttctcaaaacttccctccagagagtcacccccatggccagggcataccaatacttcctagcaagaccctgggtttctgagttagggttactattgctgtgataaaacaccatgatcaaaagcaacttggggaggaggaggcttatttgactttcatctccacatcatcatttatgatagaaggaagtcaggaaacggcaggaacctggaggcaggaattgatatcatggccatggagtcatgctgcttattggcttgctcctcatggtttgctcagccttgctttcttatagaacccaggaccaccagtccagaggtgtccccaccaacaatgggctgacccttcccacatcgatcacttattaagaaaatcccctgcaggcttgcctacagctcaatgttatggtagcattctcaattgaagttctttcttcttcaacgactgatcacaaaggaactgtcaaagctctattcgtctccatttggtagtggtggtgttctctctctctctctctctctctctctctctctctctctctgtgtgtgtgtgtgtgtgtgtgtgtgttattctgacccatttccaagtcaggggtggaatccagggctgggtacaaagtgtggagagaaagatttgtccacagttccatagatagccactgtcagggttagaattcccgtttacatacttttctatggtcccttaactgttttcagtgccctagtgtggacctgtatcccagagacatgccccagaaaagctgccaatgttttagcgggtatttctaggaacaggagccccagatggtgagtggaagaaggcattagatcccatatcaccatctttgactccagatacattgctttctttcttctgcagctagtgaggaatctcaaggaagcagaaattcttctcccgagagtgagacttcctgccccataaccaccacaggtatggagaaaacgtccacgaacagacagacatttggccatcaagcaaggctatgcaagcccctcaagcgatgaatacaaagaggaaaggaagctagccctacttgcttccttcttctccaaagcaagaatatggccatagcagcataatcaacccaaggcagtctgggaagatggctcagttggtaaagtgcttgtcatgcaaagcacgaggacctgagtttgatccccagaaatcacactctatttttaaaagcgctagtaaggcagtgattacctataatcctggctctgaggaggcagagacatggtgatctctgcagcttgctggccatcagctagtgtagcagaactaatgagctcaggttctgtaagagatctccaagaaataagatagtcaattaagaaagacatctgatgttgacctccggcctccataggcacacatgcacacgcgtgcacacacacatgaatgtgtacaccctctctccacacacacacacaatctaaggaaggagaaaccacaggacagaggttgaagtctccagacactcacctggccctcacatcgcttccctcaacctgagttgtagccggcggcggccacgaattactgggttcctgaaaggaaagctgggcatggatgggaaggacggtgagagaaataatgagccaagacaaagttctctggtcaagactcaatctttaattgtagggtcttggatttaaaggaaggagggagactcatccccaactttgccaggatctccattgctttgtcaggttctcctcaggaaagcaagctcagctgctcagcaggtagcttcatgcaggaagctgcagatgtggcacacaatagactttacctaggtaggaagactccaccctaggtgggctagccagctgtggccgaaataggtctgattcagccgctcaaggctgggggaagggcgcactgagtggctacctactgggaagcccctcctctcccagccttgtgcagtcctatgctagccataaaataagtatcccctcatctctcttctccacagacttcccacaacccacagaaacaactgcaatgacggagacatttgtgctcacaatggagtataaggtagcaggtgggccagctcatttactttacggacaatggtgaagcatgcaaagacgtgggtagtttagctggttgaaacggccactaattctttcactaatggttgtaagggtaaagaagactttaatcgctatcattgctcaaaatcccatgggtcagctgtagtacgttgggagttgtatcagctaccttttgtgttgctgtgaccagaagcctgacaaaacaaaccgaaggaaagaaaggtttgttctgactcccagttctgggatccagtccatcactatgggcaacccgtggcagcaggagactgagcagctggtcacagtgcatctgtggtcaagaaacagagaaaagctagccactgtggtgtaaacctttaatcccagcacttggaaggcagaggccagcctggtctgcatagtgaattccagtatagccagaacgacatagtgagaccttgtttcaaagaaataaaagaatttttaaaaagagaaagataaatgtttgttcccagcttactctcctttttatggaacctatggaatggggccccacatttagagcagtctccctacccatttagcctaatcttgataacctctcaaggacgtgtccagaacgttatctctaatgtgactcgaaaacctgtcaatcaacataaaccaagagcatcatcagagttaaatcacccaaaaccagtttctcccacatacattttcaagaacaatgcctcccaaactttggtgagagacaaagcaaggatccagggagagaaaatatagtgtccatacgcacctcagttattcctggtaggaggcaaaagcaggccttcctgaaccacggaatcaatggaagcttctggaagattcacatgtcagcatttgggaagtgtgagcacttccaggcgatatcggtgtgtttaggatttcttatcttgtttcaatagttcctttatgaaggatgatgctgctaatgaggactatcctctgggccttcctcaggttgagctgttctgtcaagtaccagcctctttctatggctgttccttctatgccccctctgctctttgaaggctccttgatccttctaagaaatacccagggagaagaggaaagaaagaagaaactgcaggccccagctgttcaggaggtccttgatcacctacagaattttctcacctgatctacagatccaacccccgatccatgcattcccaaagcatggtcctgacctgaactccatctccctctcttgacagtggccagctgcctcttcctgctcatcagcatcctcctcctgagcgggctcacctggcaacacagatggtaagtccaacactggaaggacccagcaccccagtgtctggtccctggcctggcatcgtgaacattgcctagagcttgacctcagctgacacgctgggaagatggctccgacgaaagcatgagatgggtgtgcaattcctaaaagctttgtttaaaaaaaaatcgaatgtgatgatggcatttgcctataattgtataattcaagagctgaggaggcaggcagaggtggatccctcatactctctggccagccagcctagagaaactggtgaactccaggttgatcaggagactctatttcaaaagtaatgtgaataatatactaaggaacaagattccaggttgacctctagactccacagtcatttactccctgacacacgtactcttactgaatgtgtatgcccggtactgagtgggttacattagcaaatgtcacccctactctcagaggtctgtgctgtttagagattaggaaaacctaggcttcccgaatgtgcagatagcaagagtttgaatcctatttagagatcttcaaccttgccatccatccaccagggctctaccaaggtcgctggaacagaccatgccaccccaccctccctccaactccgctgatcatccactagaaaccagcatgggtagcaagggatggagagaggagacggggaccatggctagaccaggcttgatggtatggatgaaggttgctagatactcacaaggctttaaaaaaaacattcttgcatttatcattaaatacagtgaaaagctcccggatagcaagagcagggggaggctctgtattctgtgtctgtgtgtctggctgtgtctgtgtgtctgcctgtctgggagttcccttgttttttaggccctaagtatcttggtcagtgatatctgccatggctcatataatgtctttttatggataaacatattttcaagccatgattaagtaaagagttttgtgtgagacagaaaccagaaatcagaaatctaggtgaacatacaaattgcacgtgcatgtgtgcacacacagacacacacacagacacacacacagacacacacacacagacatacacagacacacatagacacagacatacacagacacacaaacacacagacacacagacacacacacacacactggggggttggaggaggactgtgtatcatggtacattccattgatctcagcacacaagagttggagacaggaagatcatgagtttgagtttgaaagcagtcgggctgtatagaaattcgaatgccagcctcatagtgagagctgtctcaaagtaaatgagtaaataagatgccaagggatgtagttcatttggtagagtgagagctgagcatgcccacgaagcccggacttgatctcagcaccataagaaaccaggtatagcggcataagcctctaataccagcgctcaggaggtagaagcagggaaatccaaagttcaaggtcaccctgggctacatgagatcttatattaaaaaactaaacacattattttttaaagatttatttatttatttattttatgtgagtgcactatagctgtcttcagacacaccagaagcgggagttggatcccatttcagatggttgtgagccaccatgtggttgctgggaattgaactcaggaattctggaagagcagtcagtgctcttaaccactgagccatctctccagccccaatacattatttaaagaagaagaagaattagaagaagaaggagaaggaggaggaggaggagaagaagaagaagaagaagaagaagaagaagaagaagaagaagaagaaggaggaggaggaggaggaggaggaggaggaggaggaggaggaggaggaggaggaggnnnnnnnnnnnnnnnnnnnngaaggagaaaaggagaagaagaagaagaagaagaagaagaaggaagaagaagaagaagaagaagaagaagaagaagaagaagaagaagaagaagaagaagaaagagttaagagtataaaaccatcttgagaaaagccagatacatcctcattagagtcagctgtgtgagatgttctgtccctgtctttgtttcatttcctgtgggtgatataaaataccccaaccaaagcagcttaagagagaaggggcttctctgacttacaggtccaggatgcagtccacccttgtgtggcagctaaggtggccgaaacccgaagcctttactcatatcacaccctccatcaaaagcagggatcaatgaatttgcatgcacacttatcccagctcacttcctctttctatacagtctaggacccaaatccatttagactgggttttcccacatcgattacagtaataaaaacaatcccctgcaggcatgctcacagatgacctaatctaggtaatccaccattgagattcccttccggtaactttaggttctgttaaattggcaattaacactaaatcatcacacgcctgacgtcaagggtgtgcccctcctgcccgagcaggttctggccagccctgatactttaaatctttaataacagagtcataggtatgtgggtgagaatccagtttcttccattcttttgttgttcatctggcctccttctcattttcctcaagtggagcaagaagcagaaggcattgaggtccacatgagggtaccccgatagttgctgtgctaagagttactcatggccctgacactctacccatttccttaagatgttcttttagagttctgggagataaaacgtgatgtaatatgccttgacagtctaggcccctcagtccttgtgagaccttcttcctgctcaggacgagcatctacctggcatggcattttcgtttggtgaagacaccagactcagaaccagaggacagggctcttcatgagcaacaatagcttagagtttacaatgtgaagcaaggagctgtctaagactgtgagattcccctagacctcccagtagcggggccattagggagactgaaatagaatctcaatatgacccctttggtcaaagaatttgtccaagaaaacaaaacaaaacacttctgaaatcccagccacaaggagtccagcataacaaggtcctgttgcagacacataggtgcctgtgctcacgtttgtacatatatatatatttacatgtgtgtatatatgtgtgtatatatatgaaaaaagtttactttctagaagctaatttcatctaatgctgccctcttgtggccaattggaaatcttacctctgaattctgaaaatttcagtctttgccactttggaacacttaccaggagctaggagggcactggctggctcacattagttacgtttttaggaatttcatgggttttgttttgtttcgtttcttttctttgtttgtttgtttgtttgtttgtttgtttgtttgtttgtttgttttgagacagggtttctttgtgtagccctggctgtcctggaactcactttgtagaccaggctggcctcgaactcagaaatccacctccctctgcctcccgagtgctggaattaaaggcgtgcaccaccatgcccggcctcattttttgttttaaatgttcgccctgggaatttaatccaaggccttgagcatgctagacacatgttctattcagctatgatccagccctttgaactgttttgttaatacttttctctctttttctgtttcgtaatgttgatttttgggtgggattggagcacgagcatccggaagttagaggacaagttttgagagttggttttctccttcattcactaggattggtgccaaactcccttactccctgagacatctttctcccccagtcggattgttaggttttgtgtgtttgatttggtttagagcagtagtccttagccttcctaattctgtgaccctttaatatagttctgtatgtttaatggctaatcttactccaactcagcagttattagtccacaggactaaatgaggaaaaatccacaactgccaagtgtcagacattgcaccgcaggccacagacatgcacaacccagccctgctcgtaggaactagtagactggaagaaaaaaaaaacttgaaatatttttgtggtgctgaggatacaggtcaatagtagaatgttttctcagccctgggttcaatccttagtatagaagaaaaagaagaaagggagatatgggtggaaggaaatacggagggaggaagggaatgagggagggagggagggagggacatttgttgaaagtctaagatggagatatgtaagcagaaggacatttaatctacatgggaatcaaaagacagctgactgagctggtatactctgaagtgtcagataaaacgagccaggaaacatctcctggaagaggaagctggggcacctatggaattgtgaatctgtgtggtgatgtctgagagaaggttgagttgtaggacataaaatgaatgggcaccatggccacaatgataccacactgcccagacagtcagaaatactgtcatggaagatgaggccgcattgaggagctgggccaagatgctgatggtggtggcacctcagatcacctcacctaggagagaaaccgttatcttggccttctgggtgatctgctgcgtagaggcttaccgtgggcaatgtgttgacaatatgattgcattatggtggaataaatccacatagaagttggtgactgtgcttttgtgggtctgtggatctgagtgaatggaggaaacaaaccaaggggtatagaaaagaattgagcaaattagtatgactggtaagctggataaaaagatggagtatggaagaaggatgagtcagagaggggccgtgggtttctcagacagggagcctctgtagccactacatcctacagtgaaatgcaaattgggggtctcaagcaatgcatcccttagaggttagccacaagcatagcccagtaggacatcttgctcagacccactcagctctataaccggcctagagttagttgtgttgtgagatgaccttctgtttgtttgtttgtttgtttgtttctcaaaacactgggttgaattgccagtgcacagagcagagactgagtgcacagccagtgttgggcccctgggtggttgctggagcttgaggctgtttttcgtcaggtgggagggtaacaagattctgaagtagaactccaagttagactctcagctagggggctcaaggggactgttcagatggaatgggtttgggtggagaccatgttgttctcagtatacaatggcatgcatggctgtgacagggttattcttcttccaggaggaagagcagaagaaccatctagcaagctagaaaagtcagagcccaggcaagcggatgggaatcacaaagctcaagccaaatctgagacgccaagcattcacctaacggctgtttccttctgatccctgggtttctagaacattctgaagtcacaggacataacagcaactctatcactaaactggactttgccattgaagaataggatctaaccacttcagcacagcagttctaaagctttaatgggagagagggcccaacagtgctctgtgtgttttgtttttgtgtatatctgttgatgggagctgagatggtgtggtcacttttcatgtaacatatagtatagaaaaagtagctttaggttgacttcattgttacaacccagtttggaaagcccaagtaaaactcagcactaatgtaaataattcctcctcctcctcctctctcttttcatcctccgctccatcttcctcttcttcctcctccttttccacctcctctgtccctacccacccccacccatccactttccttcttcctttctgctctcacaagctcatcctagctacacgtgcatggctggctcctttttcaacctctgtttgcctaactggctcttctgatttcatcacttactgatcagcctttaaaactctgagctggcaaagatgactctatctatgttcttggctcagtcccagaaggaaacccccttttcatgaagcttcagttttgacatcctgaagaacagaaactgtggcagaacaatcttcagataacatcaaaacaaagtggagaagccacgggaactgtggagctctggtattcagaagcctgtgtctagggtctgcgccaggagcagaaggctgaaggaagtcccaggacgtggacttagatgctttcccagcaggccactctaagcgctggtttctttgggacagctgtcaattgtacgctcaatttagcctgcactaatctgatgcttacaggtgaacactcaaggcacaggtatggacttggtacataccgtgaaaacactggaaagaaaagaatactttcaagtttacagaaggaaggaaggaaaaaggaagcagaggtggtgattatacaaaagattagctgtagactggatatcccaggcatcctcggataatgcccccgccccagcaccctgatccaggtcaccaaagccttgtgagatcagactgcagagccagtctgtctctgagtcagtaaatgtagaatttggatttctcacaagttcctggcggtgtcttttttttttttaatattttttattaggtattttcctcatttacatttccaatgctatcccaaaagtcccccataccctcccccacactcccctacccacccactcccactttttggccctggtgttcccctgtactggggcatataaagtttgcaagtcctggtggtgtctttatgctgatctctagcccacactttgtgaggcactgggctatcccagtgtgctctcctcttccacagataccaaaagcacctgggtttgatgctcagacttctgagcacgttcttgttcaatctcttgcgtaagatttcctctcagatgagttgagtcagattctcatgtttaacagtgttttaggggattcacagaagcccaaactatcagttttcatttctgaaaaggctggaaaattttatgaaaaactttcaaaggtcagacagagccattttgagtcttttatgtgaccaagtatgaaccagatctttcctatctatggtctcccctttccaaaatatatcttttgtggggacacggcaaggaggaaagttaaatagaatctcaagctactaattttagaaaagaaaaaaatattaaactcttactaaagagctgtgggtagtggtacacacctgtaagcccagctctcaggagactgaggcaggaggattgcagtgagtcagagatcagcttcacctacaagcaaaaccctgccttacccctcaacctttccataaaaacagtcttacttgtgtaaaattaatttttaatacatatttgtgcacgatgtgtgtgcctggtgcccagggaagccaaaaaaatatgttcaatgtccctggaataggtggttatgagctgccatggaggtgatgggatttaaacccctgttctctgaaaaagcagctagttctcttaaccactgagccatctctacagccccattaaattgaattttattgtcattactcaatatgggagatggggtaatgataacaattttttttttataatactaagatgtttagctattttactctccttcacaagtgtagagtagaattttctagaagctacatgcatgatattatcgctctggtgttaacacataatggatttatcttgttaataaaagaattagtaaataatattttaaattttttctttgttttagttttaagatgattaatatctatagatactagtgtacattaagaaagcctttgggatcctcaatcattttgcatggttttagtaattttttaataacataaagaaggtctgacagattatgctaaagagctattgtggtatggattagaaatggcccccacaggctcctgtgttcaaacatcagctagcagtgctgctttgggttttggaacctttaagaggtggggccttgcttaaggagataggtcactggaggtgaaccagacttgcttccagtctccctctctgctgtcccaggaagccatcatatgaggagtttcacaacatacttctgctgccacagagtccctccagtaaggcacgtactggccactgtgtagtgtaccctctaaaactgagctagagctcccctctcctccctacactatctctgttgatgctttgtcacggtgatgaagaacataagtaaggcaaagacaagacatagtttggagactcacgtgagcatctcagccagactcaggcacagctgcgatgtgggaattatcaagcatgagatgcaaagcaatggaaaatgaatcgttatgacagaagcctacatctagtcttcccttcttcccattagtaataatagcccgtgttttagaagaacacatctttttggtgttctaggtagcttatattgcaaatgtggcacaatctaagagaaatctgggatgagggaacctcagtgaaagattctccttgatcagattgtcccactgatgattgatatgggaaggcccaacccactgtgaaaggcaccacccattggcaggatgactggggttatagaagcaaacaggctgagcatgagccagtgagcaagccagtaagcagtggcttctctttggaagaagcatggctttcttccgtggcttctgtttgatctctctcaatgatagattgtgacctagaagtataagctaaaataaaccatttcttacccatagttgcatcggttgtggtgtttatttcacagctacagaaaagtgaaacagaacatctttctcccaagctaatggtgtttgccagcctccttcagctacctgtgggcatgtggttaagctctgaacacagaggtgtgagtagaagcagtgtgtgacgtctgggctgtgccttgaagagaacataagtggcattttctctcttagctcttcaaaccagcaggcacatggccttgtcttgggagctagaaatcccaatggcaagaaccccattttaagtttgacaaggagacaaagttgaagaagtctagacatttgtctgatgccagggaggcattgcaacatggctgattgcattggactgaactttggtaaaaaaacaaaccagttgaggccatgacttttaccttgtgaggacaaaattaacgatcactaacaccggtactgttaccagctatatacaaaccctcttcccataacaaattttttcttacggtaatactggcatcaaaatattttgagagagagagagagagagagagagagagagagagaacgaacaattacttgttttgtgttgaatgactctgcctgagagttcccctccagcaggcaagttcctgagatgaaatgcatgagttcttatggagacatcaccatctctcggggcttctgggtaagtcatgaatcgaaaatagaaagcttctggggtccctaaagcccttcctcttatttccattccactcctcaagcgtgaaggataaaatacattccctgttctgctgtaatattaaggatttggattattttagtctggttccttggccatatatcaaaaccttatagtaaggggccagtgagatggccagtggacaaaggtacctgcggccaagcctgatgactgaattcaatctctagaacccagatgtttagagacctggtgccattaactccacatgtgcaccatagtacaggcttttttcccatcacacatgcacacacacacacacacacacacacacacacacacacacgaagcccttatttgtagcagcaagtttagctacacacacacacacacacacacacacacacacacacacacacacacatcagttaatttttgactagctcaaaggctgagcactcctaaacctccctctgctagcaaatgctcccttctggtattcctgagactcctgaaccttcccctgtcaccccaggcccaatgtagaagtggccagtggctactcacctgaattcttacatggctggttggctttctctcctgcagtgcttccgttctatccttctcccctgagtgttcgccattctctgtcttcatttctcccagttcctagcctgcgcaaatctaaaggtcccaccttagtctacctgtccagccattagcttttggctctttattgattgaacaaaaaccaattggggacaaggaccttcagcgttaggacatgcagattcccaatttggggggccagattaattcaaagcattggaaccaatccccaacacttatatattagaggcagaacttggggatacagtctccttgaagctaaattgttctttggataaacaacactactggtgacatagaagagataaaaaccctacaaacttggtgtttttgttattgagacagcgtctcactgtgcagcccaagctggccttgagtttacagtcctatttcagctctctggtatttcaggtatgcatcaacttaccaagctataaacttggctttcttgagccttgaacttcctatgtattgacaaatacccttgaacttctggtcctcctgtctctacctcctgagtgctgggatcacagacacataccaccatgctccatttacacaatgccggagatagatcacagggcctagtgcagattaagcaagtactctggcaaaccagaccaaaaaaaaaaaaaccaaaaaccaaaaaccaaaaaccaaaaccaaaccaaaccaaaccaaaacaaaacaaaacctgagacagacaccagtatattaggatactcttgaatcctccctttttcgtcccctccaaaattgcaactagagttgtaagttctgccccccatgcaaacaaacagtccagataaactgaactctagtggtaaatgtcaatgagggggacctctgatccacatatgtcaagatggaggtttggaaacactacatgcagaaactccatagctgaagtcacaggatggcggggtgacactctgtattccagctaacaagctagggaactcgactgtgtgcacgtcccttgtaaccacctacacatgaactgggaaacctaagatccctggatgttaatctgctgggttgaaaaacattccacctcctgtgtgaccagagaagtgggggagcaggaaacaacagaactggtttccttcctacccactcacagcctctctgtgatggcaaagggaaagatacagagtacttaaggccaaagcttgagacttcttgaagctttgtgagttgtggaggagagacagttctaatcccagagtccttgttaagctgaggtacctgagaatttagaatggtctagctgtgttttgagaccaaccactatgaatacaagcccggcagactggacttggaaaaacaagggaaaattagagacgtcctctgaattttcctttaataaatatggctcaaacaagatccaagtgttcctacctgcccaacttgtaaggcatggttagctgaggacacaaacaggcatacctctcaggggaaagagctcagggaccctgccacaggcctgcagcaaagtgagtctccagatgggcactgtcctgggaattgaatggacacccacagacatgcaggctgctacctgctacactccctctccattatacaacatctttgaccccaaggtcaaaatttaaaccaaattcgaattgagttaataattaatctaggaaattcctgcagtggataaaggaaataaacttgggatgaaaaatattcaagcgaggacactgagggcttagaatcagatattaaccactatgactataaactattgttcttaccctaggtttggaggccaatctgttcccttgtcttaggaaaaatacataatattttgctccacaaaggacacgtttgggagtcatggccatttcctttcctctccaacaatttccatccctgaagatgtcttgtgtgtatgtgtgtgaatgtgtgtgtatgtgtgtgtgtgtgtgtgtgtgtgtgtgtgtgtgcatcaaacactcaacaggaagcaacttaagggaaaaaggtttgtctggaattgctgttctagggaatgtggctcatcttggcagagaaagtatgacaagagatgtagaagaagcaggtcacatctaaaatctagaaacagagggatagtgatggtcagtttgcccatgaaacggtaccagacatttcagatggttcttccctattcgcaagcatcttaatagacccacacagaggtgcgtttccatggtgattctaaattcaatcaagttgaaaatcgtcattaacaattacaaattcaaagaaatcctaaaagacacgttatggaatacaaggcgaacccattatgctatctcaaagcaggtacgaatgtccatccgtcgttggtggtccacaaggggaaatactcttcaccacactcgtatttttaactgaaaaatacgatcgatgcatgcgtatccattcctgtgctggctggttttgtgtcaacttgacacagctggagttatcacagagaaaggagctttagttgaggaaatgcctccacgagatccaactgtaaggcattttctcaattagtgagcaagggtttggaaaggccccttgtgggtggtgccatctctgggctggcagtcttggttctacaagagagcaggctgagcaagccaggagaagcaagccagtaagtaacatccctccatggcctctgcatcagctcctgcttcctgacctgcttgagttccagtcctgacttccttggtgatgaacagcagtatggaaatgtaagctgaataaaccctttcctccctaacttgcttcttggtcatgatgttttgtccaggaatagaaaccctgactaagacaattccccaagctgaaacttaaaagagacagcacctgcttcaccaactactctttgctttccttgcctggtaagtttaaagatacgttgttttttctatcagtgtttcagggtgtaaagaccaattagaatatactcagtcaatttttcatacaatgtagctcaaatacaaaacacatttgtatggttacaaaccatgaatgagctgtcatagttactgaagctcacctggctggttgtgatggatatccagacttccggacccacatggaaattacagctgtgctagctgtcttagtgttagaagatgctactacgtaggctgagggagaattctttataacagtcttactcagttatgagtcctgtatgttatactactgacctggcaggcaagatatgctcactggttcaagagcttcatgattgatgagcaactactttctgattcaatttgaggcctgttccattcaactcatgtctggtacagtaaccttgatcaaaagtcagagtccaggcaggccataggtaccactagagaagcatctgctgttgttttgccaaatggacaagatgtccgatcaaattatctcctgaatatttatgtttatacctatagaatactatttgatccactttggtcatagaagctttttttttttttttttttttgcagtaacaagtagttattgtagagacataactagtcaaagctctgataatcaaaaattgttgagctgggtgatggcggtgcatgtctttactcccagcacttgggaggcagagacaggaagatctctgtgatttcgaggccaagctggtctatagagtaaattccgtgatagtcagggctacacagtgaaacccatcgaaagagacagacagagacagagagacagagaaagatgagctagagagacagagagagacagggtcagagagatatagacagagagacagaaggagagacagacaagaaagacagagagataagacagagagagatgagagatgagagaggagagagagagagagagagagagagagagagagagagagagaggcagacagagagacagacagagacagacagagagacagacagagagacagacagagagacagacagagagacagacagagagacagacagacagacagagagacagacagagagacagacagagagacagacagagagacagacagataggagacagaggagagagagaaatttaaagcaaagcacatcttcagtcttttcaagaatattgctcannnnnnnnnnnnnnnnnnnnnnnnnnnnnnnnnnnnnnnnnnnnnnnnnnnnnnnnnnnnnnnnnnnnnnnnnnnnnnnnnnnnnnnnnnnnnnnnnnnnnnnnnnnnnnnnnnnnnnnnnnnnnnnnnnnnnnnnnnnnnnnnnnnnnnnnnnnnnnnnnnnnnnnnnnnnnnnnnnnnnnnnnnnnnnnnnnnnnnnnnnnnnnnnnnnnnnnnnnnnnnnnnnnnnnnnnnnnnnnnnnnnnnnnnnnnnnnnnnnnnnnnnnnnnnnnnnnnnnnnnnnnnnnnnnnnnnnnnnnnnnnnnnnnnnnnnnnnnnnnnnnnnnnnnnnnnnnnnnnnnnnnnnnnnnnnnnnnnnnnnnnnnnnnnnnnnnnnnnnnnnnnnnnnnnnnnnnnnnnnnnnnnnnnnnnnnnnnnnnnnnnnnnnnnnnnnnnnnnnnnnnnnnnnnnnnnnnnnnnnnnnnnnnnnnnnnnnnnnnnnnnnnnnnnnnnnnnnnnnnnnnnnnnnnnnnnnnnnnnnnnnnnnnnnnnnnnnnnnnnnnnnnnnnnnnnnnnnnnnnnnnnnnnnnnnnnnnnnnnnnnnnnnnnnnnnnnnnnnnnnnnnnnnnnnnnnnnnnnnnnnnnnnnnnnnnnnnnnnnnnnnnnnnnnnnnnnnnnnnnnnnnnnnnnnnnnnnnnnnnnnnnnnnnnnnnnnnnnnnnnnnnnnnnnnnnnnnnnnnnnnnnnnnnnnnnnnnnnnnnnnnnnnnnnnnnnnnnnnnnnnnnnnnnnnnnnnnnnnnnnnnnnnnnnnnnnnnnnnnnnnnnnnnnnnnnnnnnnnnnnnnnnnnnnnnnnnnnnnnnnnnnncttcccctcccttcccctccctcttcccctaccccctccacctctctctctctctctctctctctctctctctctctctctctctcctcctctctctctctgtgtgtgtgtgtgtctctctccctctctctccctcagggttttatgtataggagtacactgtagctatcttcagacacaccagaagagggcatcagatcccattatggatggttgtgagccacctcatggttgctgggaattgcactccagaactctggaagagcagtcagtgttcttaagggctgagccacctctgcagccctatagcacccggggcaacctgtgtagggatgatattgcccacagagagctcaattgtccctcatcgatcatcaatcaagaaatgctttagagacttgcacctcctcagatgaggttctctcttcccagtgattccagcttgtgtcaaactgacacagaaatgaaggagcacaaataccattcagataatgtaatcctgaaaccgagaaaagagtgcttcagatgaaggaggttgtgctgacttgactaaaaatggaccccataggcttgcatattcaaatgtctagtcatgtgggcggcactatttgaaaggattgaaaggattaggaggtatggccttgttgaagtgggtgtggtcttgttgaagtgggtgtggtcttgttgaagtgggtgtggtcttgttgaagtgggtgtggtcttgttgaagtgggtgtgtccttcttagaagaagtgtgtcattgagggttgggttttgagaattcaaaagcccaaaccaggtccagttccactctcttttggcctatggatcagaacctcagcatctgctccagccccacacataatgctctgtgccatgatgatagtggactaagcctctgaaactgtaagaaaggccccagttcataagagttcagtttccttcataagagttgccttgatcacagtgtctcttcacagcaatagaacagtgactaagacaaaagaacaaaaagatgaagagtaaaacctgatgtgtcagaggaagacatggcaagaagatatgagacctgggtgggaaccacaggaaaaaaaagcctgtcacacaggtgacagtgccagttatgaagaataagaaaatggaaacaaaactaattcaagcaagaacagtcttaaagcctcatgattaaaagagaggccttaaaatgtgattaaaagatgccttcaaatacagcacaattttgaactcattgtgatactgtcttaatcgtagtttatactctttatttgcaaagaaa

SEQ ID NO: 58 - DNA, 1781 bp, Mus musculus
atgtgccaggaagatggagccacgcttgctgatgttggggtttctctcattaaccatagtacccagttgtcgggcagaactgtgtctgtatgacccacccgaggtccccaatgccacattcaaagccctctcctacaagaacggcaccatcctaaactgtgaatgcaagagaggtttccgaagactaaaggaattggtctatatgcgttgcttaggaaactcctggagcagcaactgccagtgcaccagcaactcccatgacaaatcgagaaagcaagttacagctcaacttgaacaccagaaagagcaacaaaccacaacagacatgcagaagccaacacagtctatgcaccaagagaaccttacaggtcactgcagggagccacctccttggaaacatgaagattccaagagaatctatcatttcgtggaaggacagagtgttcactacgagtgtattccgggatacaaggctctacagagaggtcctgctattagcatctgcaagatgaagtgtgggaaaacggggtggactcagccccagctcacatgtgtagatgaaagagaacaccaccgatttctggctagtgaggaatctcaaggaagcagaaattcttctcccgagagtgagacttcctgccccataaccaccacagacttcccacaacccacagaaacaactgcaatgacggagacatttgtgctcacaatggagtataaggtagcagtggccagctgcctcttcctgctcatcagcatcctcctcctgagcgggctcacctggcaacacagatggaggaagagcagaagaaccatctagcaagctagaaaagtcagagcccaggcaagcggatgggaatcacaaagctcaagccaaatctgagacgccaagcattcacctaacggctgtttccttctgatccctgggtttctagaacattctgaagtcacaggacataacagcaactctatcactaaactggactttgccattgaagaataggatctaaccacttcagcacagcagttctaaagctttaatgggagagagggcccaacagtgctctgtgtgttttgtttttgtgtatatctgttgatgggagctgagatggtgtggtcacttttcatgtaacatatagtatagaaaaagtagctttaggttgacttcattgttacaacccagtttggaaagcccaagtaaaactcagcactaatgtaaataattcctcctcctcctcctctctcttttcatcctccgctccatcttcctcttcttcctcctccttttccacctcctctgtccctacccacccccacccatccactttccttcttcctttctgctctcacaagctcatcctagctacacgtgcatggctggctcctttttcaacctctgtttgcctaactggctcttctgatttcatcacttactgatcagcctttaaaactctgagctggcaaagatgactctatctatgttcttggctcagtcccagaaggaaacccccttttcatgaagcttcagttttgacatcctgaagaacagaaactgtggcagaacaatcttcagataacatcaaaacaaagtggagaagccacgggaactgtggagctctggtattcagaagcctgtgtctagggtctgcgccaggagcagaaggctgaaggaagtcccaggacgtggacttagatgctttcccagcaggccactctaagcgctggtttctttgggacagctgtcaattgtacgctcaatttagcctgcactaatctgatgc

SEQ ID NO: 59 - protein, 268 aa, Mus musculus
MEPRLLMLGFLSLTIVPSCRAELCLYDPPEVPNATFKALSYKNGTILNCECKRGFRRLKELVYMRCLGNSWSSNCQCTSNSHDKSRKQVTAQLEHQKEQQTTTDMQKPTQSMHQENLTGHCREPPPWKHEDSKRIYHFVEGQSVHYECIPGYKALQRGPAISICKMKCGKTGWTQPQLTCVDEREHHRFLASEESQGSRNSSPESETSCPITTTDFPQPTETTAMTETFVLTMEYKVAVASCLFLLISILLLSGLTWQHRWRKSRRTI

SEQ ID NO: 60 - DNA, 70271 bp, Homo sapiens
tgtagagacacggtctcgctctgtgcctaggctggagtgcagtggcacaatcggtagctcactgcagcctcaaccttccaggctcaaggatcctgccacctcagcctgctgagtagccgggactactggcacgcaccaacacacccagctaatttttaatttttttctagagaatctggtctcactatgttgcctaggctggtctcaaattcctggtcccaagcaatcctcctgccttagcttcccaaagtgctgggattacaggtgtgagcccccacacccagcccacttccgctcttagggagaggcgagtgcatttcagagagcactcgatgctcccaaaagaagaagttgacagagcccacgtcccctcagcccttcacacagcctccccttgtcttcctctcctactcagcactgtggctgcactaggacccctcatgatgaccaagatcctcataaagaggacaagaagttcatccagtaccagtcaggccaatatcccaaaattagcataactggcagaaatgcagaggcatcaacaactcctcttgacaacagggttggtagaagaatcaagggcctaattttgatgcctggcacaggttatgggagcagcagagtacatgctgcccagcggcttccagaagctcctggtccaccccgtcaagaagccggaggtcctgctgaggtgcaacacatctcagtgtgctgagactgccctcaatgttgcccccaagaactgcaaagccatcctggaaacagtggcccagctgcccattggagtcaccaatcccagtgccaagctgtgcagcaaagaaaaggattagactgctcatgtgcacgttttatttgtttttaaattaaaaaacaaaaaaaagaaagaaggaggaagtggaggaagaggaaggaggagggaggaggaggaggaatttacatcagcaggccgatcacatactagtccttgaattcatggttgaatgtactgaccattctccctacggacacttgaaggtttccatcaaacccttcataacatattgcataattgtggactctagacttgggccacaactgagtgattttttttttctcaaacccaattccacaaagtaaaagcctgatgaaatacagtgaaggctgatgccttattaactgtgtttcccaaatccagagctctaaaaaggttctgcatacagtcattcattcaatgcttaacgactgagcattaattccatgctaagtactgaactcagcactaggaataagaaggcgacctagaggcatatcctctctctaaagatgcatagagcctcattggaatgatcagccgtgtctccagagagctacaaggcagttttcaattggtaaatgccctgagagtgatgggcttgtggcatgtgtaagggttagacagacctgggacctagacatgacaccactcctgacgaattatgtgagtgtgggtgtttcacaaccacaatgagatgcaatgcctgcacttgtaacatggaaatagtgatggcatgccggccccgccagattgctgtgagaagtcagcggcagagacatgcaacattctcagcacagtgcttgccatgtagtaagggcctagtcagtgctagtgattcctttcaatattcctaagatgcagataagggaacagcccagaggagggggagcacttccagagggagggatgcggtgagacttccttcagcagggtagcactggagctgggtgttaaggagtgagtgagctttgggcttatggatttaacagaggaaaccaagaaaagaggaggcggtgttgcaggaacagtgagcagttgatgatttttattttgttctctggtctgcttgggaacatttttgtggcaaagacagcatgaaggatagcgaagaattaatactgaagagataggccagggcaggttatgaaggattttgaataccgggctaagaaatgtgggcttaatttcaaagacattatggacactcctaaaatgttacgttgtagataagggaaaagtattcttccagaagattaaattggggctgggcacggtggctcacgcctgtgatcccagcactttgggaggcgaagtgggcagatcacctgaggtcaggagtttgagatcagcctggccaacgtggtgaagccccatctctactgaaaaaaaaaattagccgggcatggtggtgggtgcctgtaatctcagctacttgggaggctgaagcaggagaatcacatgaacctgggaggcagaggttgcagtgagccaagattgcaccactgcattccagtgggcgacagagcaagactcagtcaaaaaaaaaaaaagattaaactggaagcaatgggtaagaatggtggagtggagagacacatttgagtgagggaagccagctgaaaagctgtacagacgtctagacaaaatgtgacacaagcatgccttcacctccctgcaaagaccacagaccactgagctccaaagggggtttggaatccttgtcctgggccgccattggtaactcatcagtgctggcttgagagataaactctattatccatccctgaactaaaatcatgacagaagtggccagggagctttgctgctatccccccaggaaacacgtcctccactcaaatggaaagaggaccctctgacaacatctgtgggacccaacagcactggtcaccacaagccacaaaatgttaacaaagtcagttttcaattgttagggacggaggactcagttcatgattcatacaaaccaactgttctctcccagtgttttctgggtggcacaacccacaagtcaacagtggcttgggaactagacatttgagtagagttgggttatttgattcatagtggattttggttttccacgggacccctgtgcccttgtctagtagaatctggtggaaattacaaactgcagaaattcaactcagtgccgcaataacaggatgcacctgtagatttcgtagaattagcagcagcattctttcaataccagtttgagagaaataaccctgtttgcatagtgccaactggggcagaatctgaagtgtcttgcctgcctctcggccatgggaggcaccgatctcagcaacatctatccaaccgccatccacttaacaagcaaagatggaaggccctcgtgctccaggctatcctgcaatggttcatttgcttttgatgggattatcactttgacagatgtgcttgcaattaactgggggctttctgcttccaatccaaattcccacaggtggatcactggctcttggggagcaaaaacccttctttgtttgtttttgcttctcccagagcctgggcagagctccccattcctggatcctacgttgatatgcactgaattgaattatactaaagggtgcacccaagagtgcatgagctaagtaaaatgtaatttgtgggacctcatgtggacatttcaggtccatgtgtacaagataaaggagagaaaatcctgggggacaccacaggcctgggaaaatgacctcctactaagcctaacaagaacatccagtacataaacagcaggctctctgcaaccgcttcggtccttccactgccacgctcccagaaagcaaagggttatctcctgttcggattttggctctgagaccacagctcagcacatcactcctctagagaaaagaaagtctaagatgagagagtgaggctgctttcatgtggtgccagcgtatagtgcagggcaggcctgattgctgaacggatccctgcagacgtgagcggtcacttccccttttgagggcccatttcttttcctctttgaggagactgtgagcgtcctcagtgcagggctatgttttagcttcttggctctcctcacaggttctagcataattctttgattaattgcagtcaacgtttattgatggattatgtgacagaggtgaaattctttgatctgggtttcagcttttcctttcccccactccctcctttttctttttttttttttttttttttagaggcgaggtcttgctctgtggccctggctggagtgcagtggtgcaatcatagctcattgcagccttgacctcctggggtcaagcgaacctcaacgtcttggcctcctgagtagctgggactataggcatgcgccaccacgctcagcttcaccttttcctttccttgtgctcccctggcagatatgctggtaaacaatgaaccagtcaagaggacagcaacaggaggaaaatgggagaaaccccattattcgtggactaaacaggcttcccactagtcctggctcacagaggaagtcatgctccatgtttcaaatgtcctcaaagctcgttcaactccaaaatgcatgaagacaaaatgggaattttactcaagatttttgtgggctgttggggagaagagttaacattgcaaagcatattgcaaactcttatcttcaaatgattttaaaattttcttccaagctctttattatttctccagagctgccctgctcttcccactctgggtcctttctctgccactctcctcagcatgacttctccctaatcggccagcatttcttttattctatagagcaagttttcttgccctgggcacctctcatttgcatgttataccaccacaccaagtgagcctcagagcaccagtgttttaatccctgaaaacagtccttacgggattcagcacagaggtcctcttggcagcctgtagtctccagagtgacacgtcctcaacagtcaaagtgagcaagctatggtgcccatcaccaagtggggctcaccatttccctctgcgttcacttctctcctaccttcttccttatcccatccttcctccttcctttttttttctgcattcaattattcatggttattcatttcatacgggcatctgtgccacttggttctacaggcattttttttttttgagacagacttttgcccttgtcccccaggctggcgtgcagcggtgtgatcttggctcactgcaatctccacctcctaggttcaagcaagtctcctgccttagcctcccaagtagctggaattacaggcatgtgccaccaagcccggcaaatttttgtatttttagtagagacagggtttcaccatgttggccaggctggtctcaaactcctgacctcaggtgatctgcctgcctcggcctcccaaagtgctgggataacaggcgtgagccatcgtgctcggccggttctatgggcattgtggaagtgaccgttaacaagccccaagggtaagtaaaggaaaatgaaaggtgattgattcctcaccacctctccccttttttcctctactctttgcccctgctccccaatctagactctaataaacagaaatgatttttgttgcaagctgaaaactcgttcttgtggttggggctaggggggtggcaagtcaagctttagagttgtctggataataaatgctgtcttcaaggactgtccaacattgtaggaacaagagaacaacccaagtgaacaactaactcctgttcacaaatgctactgcctctctgccatcccctaacctcagcctcacacacttgaatttcgccaatccatttgatgagctcaaatcagtgaattttctcctcgccaaagctcacaaattctgttccccgcttcttgccccacatccaggcattaccaactgcattttccctttgcctgatattctggcatcaagcctccttgccattccaatttatttcaccttcctccagtccttatgatttccttcctgaagagtatttcagcatctctatgcctcaatcttccctgcacaccacaccagctcggcctcatcatcacatcacttggctatgtcccgcctgggttagacagcttcagtggctgaagtccatagatcttattctgtttttcgaggtccacctgactctgaatccagctgatatttctgcccttagcttctacccctctctacttctggttaactatggaccacactctgcttcctcaggaaccacctaccaaggccgtatccatccttcaaggacaatacgtgggcctttcctgatcacatcagctcaacaacttttccctcctacatttcaattgctcttcttaccataatcattagtattcaccccactgtacgtctagaaagaaagtggtcttaaacctaagggaaggcagtctaggtcagaaatttgttgtccgctgttctgagcagtttcttctaggaagtaccaaacatttctgataatagaattgagcaatttcctgatgaagtgagactcagcttgcactgttgaccggctgtccctggatgaacctagttacttttaaccaaatgttcctttcttgaacttgttcctttcttgaacttaatctaccaatgttatctagataactttcctcaaaaaaaaaaaaaaaaaaaaaaaccctctactaggaaagaaatctttgaaccggacttattggaaattacctccttgcagcaggtttgaaacaaaactttgaatttgcctcacaaagaatttgtctgaaactgctttagtatatgctagttatatttgtatgcacatgtggcttcatacatagtggttggacacccatatgtgttatgcactttgttaggtgacgtaagttcacagataaactggacatagggctatcctctagaggcccacagtttgacaccttaacctgagatccttggacctttgaagttcagagtgcccacaaccgctgggtgtggtggctcacacttgtaatcccagtactctgcagggctgaggtgggaggatcgcttgagtccaggagtctgagaccagcctgggcaacatgacaaaaccccatctctacaaaaattacaaaaaaaattagccaggcctggtggtgcatgcctgtggtcccagttacttgagaggctgaagtgggaggatcacttgagtcaaggaggtagaggctgcagtgagttgagatggcaacactgcactccagaaaccccatctcaaacaaaacagagcaaaacaaaacaaactgcccataatgctcctgaaacttcctacggatttatccagagtatgtgctgatgtgcattttttccaaggagggaaaccaaaggttctatcaaattaagaaaagagtttttaccattgtggaagacagtatggcgattcctcaagcatctaaaatcagaaataccatttgacccagcaatcctattactgggtatatacccaaaggaatagaaatcattctactataaagtcacatgcacccgtatgtttattgcagcactatttacaatagcaaaatggaaccaactgaaatgcccatcaatgagactagataaagaaaatgtgatacatatacaccatggaatactatgcagccatgaaaaggaatgagatcatgtccttggcagggacatggatgaagctggaagccattatcctcagcaaactaacacaggaacagaaaaccaaatgccgcatgttctcactcataagtgggagttgaacaatgacagcacatagacatagggaggggaacatcacacgccagggcctgctgcagggtggggggtggggtgtgaggggagggaacttagaagacaggtgagtaggtgcagcagaccaccatggcgcacttatacctatgtaaccaacctgcacgttctacacatgtatcctggaacttaaattaaaaacaaaaaagagtttttaatccaaaaaagattaacagcaactagaagaaagaaagagatataaacagtgaattgcaatgcagcacggcaggtgttatgatggagtagaaaggactggaaaaggcctcctggaggaagggacactcaagtgtctttccatttcacctgtaaactcattaagggcaaaagctttgctacagcttcagtatgagatcctgggcaatccgtgacaaaatgggtctgcttttgcacccccaacttcttctcacatccctgcatcgtgccatgcagcatcaactggaaacctcagcatcagcaaacgacgacagagcgttcatccgtaaggtgaaccagaaaagccagttcaatgacttgtttaaccatggtccatctcagaaccaagagttgggcctcttatttaccagaaaaattgtgggggctttgtgatatggctttaaaaaaatcttgtaattgccaggcgtggtggctcacacctgtaatcccagcactttgggaggccgaggtgggtgaatcgcctaaggtcaggagttcgagaccagcctgaccaacatggtgaaactccgtctctactaaaaatacaaaaactagctggatgtggtgacgcgtgcctgtaatcctagctactcaggaggctgacgcaggagaatcacttgaacctgggaggcagaggttgcagtgagccaagattgtgccattgcgctccaaaaaaaaaaaaaaaaagacattaacataaatttaaatattttataatgacaatccacattaactacttaaagcataagctattttccaggagaggcagcaagtgcattctactcccatgcccaagaagaaaggagcgtgactttggtgggagtactaggagtttctactggagcacttgcccgcagagtgagaaacgttcctagagaggaagttatacctgctgtggaatttaagagaatcttgtcatattttgacaagttttttgagatggaagtctcactctgtcgcccaggctggagtgcagtggcgcaatctcagctcactgcagcctgcacctcctcggttccagctattctcttgtctcagcctcctgagtaactgggattacaggcgcccgccactacgcctggctaatttttgtatttttagtagaaatggggttttaccatgttggccagactggtctcaaactcccgacctcaggtgatctgcctgcctcagcctcccaaagtgctggaattacaggcgtgtgccactgcgcctggctaattttttttttttttagtagagacggtggtttcaccatgtcatccaggctggtctcaaactcctgacctcaggtgatccacccaccttggtctaccaaagtgctcggattacaggcatgagccaccaggcccagtcaacgtgatgtgttttggaaccctgaattccttggcttgcccggagggttttctttttgttaatatctttgcttgctttctagtatttaaaaaattgtgttttgctctaactatgcaatggctttaagtcttagacaaatttccagggagcaaaacacactcaaccatttcataataatcagaagagagctctgatcaataaataagcaagactgaattttacaaaataatccaaagtttaaaaccaaagcccactttttgcatgatcctttaagagaaagaaatctggaagcaaaacaccttataaaatgacaatgcactttcaggagcccagggcactgtggtgaaatgatgatggctagtacaggttataagccttggggaattatttatgaattctcaggatccttcagttcgccgcatccttctccattatttgaatattggaggctgcctgaccagaatcttgtcaggactttgctccttcatcccaggtggtcccggctgactcctgaggacgttacagccctgaggggaggactcagcttatgaagtgctgggtgagaccactgccaagaagtgcttgctcaccctaccttcaacggcaggggaatctccctctccttttatgggcgtagctgaagaaaggattcataaatgaagttcaatccttctcatcaaccccagcccacacctccagcaattgaacttgaaaaaaaaaacctggtttgaaaaattaccgcaaactatattgtcatcaaaaaaaaaaaaaaaaaaaaacacttcctatatttgagatgagagaagagagtgctaggcagtttcctggctgaacacgccagcccaatacttaaagagagcaactcctgactccgatagagactggatggacccacaagggtgacagcccaggcggaccgatcttcccatcccacatcctccggcgcgatgccaaaaagaggctgacggcaactgggccttctgcagagaaagacctccgcttcactgccccggctggtcccaagggtcaggaagatggattcatacctgctgatgtggggactgctcacgttcatcatggtgcctggctgccaggcaggtaagggcctgtgggtgcccccggaattccgggaaggctgatgggcatccctcttcccagccacagaaccagagggagtccccaggtagatggttccaagaagggagttgaatcttgggttccacctcttgcctgtgacccacggggaccccagtttatgcctcactgttccttggtctgtcaagagagcctgaaatagcattaggttctcctgtccttctcagtccttgacaattaattctgggaagaatagtgtggcatgatatttgggatatttggatgttaacagggtcccgatgagcaggtttctcaagaaattatcttttattcttcaatgaatttccttttattctctgcactcccaccccccaactaagaagctatcaggaagctctttaagttcaggttaatttgctggagacatgagtactcatatatcaaacactgggagaatttaagatctcagaaaagtttagcttcaaggatgtatacactgcttttacgtcttaggaaataacacctaggaatttccttacaagtgcaactttacagaaatttttaaaaatatgcatactcacttttagaacattactacttctcataatcctatgtatatacatgatatgtatatgtatacgtgtttatatatgcaaattttaaatttcattccttgtttcaaatggattttctcgaagattttttttttttgacactgtctctgtcagccagactggagtgcagtggcgcgatattggcttactgcaaccttcgcctcccaggcttagcgatcctcccacctcagcctcctgagtagctgggactacaggcatacgccaccacacctggttaatttatttttttgtagagatggggtttttgccatgttgcccaagctggtcttgaactcctgggctcaagtgatccactcaccctggcctcccatactgctggtactacaggcatgaaccaccgtgcctggccaatatttttttttaaagaaataaaaaaccaccaacttctacctcaaaccactcttcctaattgagtgtgaattttctaataatgtcttccctttgcttactcaggaagacagataagaaagtttatagtgttttttgaaagtctataatggcaacaagtagaatgctaactggctgtagaaagaatttattaagaaatgaaacataatgatgcatttcaggagtctgcttgcttgtttaggggaagtgcccagtcatgctgggctgtgtactggcccagatgtaggagtgtctttaaagagggcattttatttacttattacatttttatttattttttttttactttttgagacagagtctcactctgttgcccaggctggagtgcagtggcgtgatctcagtccactgcaacctccacctcatgggctcaagtaattctcgtgcctcagactcctgagtagctaggtttacaggtgcgtgcaccaccacgaccagctaatttttgtatttttagtagagatggggtttcaccatattggtcaggctggtctcaaactcctgaccttgtggtccaccagccatggcctcccaaagtgctgggattacaggtgtgagccatcgcgcctgacctatgtgttttattttaataggttttggaggacaggtggtgtttggttacatgaataagttctttagtggtgatttgtaagattttggtgcacccatcacctgagcatgtatgctgtacccaatgcgttgtaagattttggtgcacccatcacctgagcatgtatgctgtacccagtgcgtagtctcttttccctcacccacctcgcaccctttcccctgagtcctcagagtccatcgtgccgttcttataaagagggcatacttttaggaaggtttttcaatgtgatttctacatccacagggtctttgctaactcagtctaagccaagaacaggaaaatcttgacaattaatcatgctctgcctctggaagacacatttcaagtaaactcgtgttatttctagctattggtgacttatccaagggtctgagtggtcttggagggagcaggggaactagagtcccataaggactccttcacgccattctcaacatctatccataccccatctgcccctcaacactataggaaatacaaaaatgagggagatatagtcctgacacttaagcaacttataacctggtgaggaggagaaaaacatagatataaatatagtaataccagtcagagtgtggtaagatctacggagcgttgggctatcagagaaggcttcatgaggatgacatgtaaagggagccccaagggaccagtaaatttccatcaatgagattccagggagagagaccccaatgagccaaaacacaggagtgccttagggagcagcaggtggtccaatgtgctcctgccctggacagggagggtggggatatggggaattcaaactggaaagttaggatgaggtaaaatgaatcatctaaggcattaggcatttttagtctgtatattgctgggccctgggatgtggtcagaaagagaattctcctagtgataacttcttaacttcacctagtaggcaataaagaactacaagaaaatttaaaactaccatttataaagtaacttctatgtgccagatatgtgtcctattgtaatcttcatagccactttgcagtatggatatcatgaacccctagatgaagcaagaacccaaaactcagactcgcacaggcagtgagagtgccagggtttgaacctggtctccctggattgttctgtttctgttcattgcaaacagggtcagcgctttatggagatgatactggcatagagtggagagagatcaggtgcacagagacaggtcatgaggctcttaaaatagtccaatcacaaggcaaatgaggacccagtggccaaagacaatgacaggggtcaagtttctggaatcaacaggaatttctaggcatcactccagggtaagaaaccatctcatcacagactttttctccaagaggaacctagtcttgaaacaaatcagactttttattcctcagggtaagagttctctaatgaaatcagactgtcaacagatgcaatttctagctgattcataagggcagattttcattctgaaaatttccaaagccaccatttaacatggcaagggtttatgaggacatattagtcaacttgagtgtttttagtctctatattactgggctctgggatgtggtcagaaagagaattctcctggtattaccaatatggcacgttattgaaggcacctttctcagaactgtggaaattctgagagcttgtatgtcccttgatcatctttctttcattctaggaattctgtgatcaaatctttatcctctagactcaaaaataattctttaaaaaaacagtgtggaaacccattgagataatgtgtttgtgtaattatccattcttgtaaagacaactgcccacaatggaatttcccatcttcacctttgtcagtcaaacacaaaatgtttaacccttcacatttaatctttcaacttcttgagatcccaaagtattattgctactgttacttcattcatcttcaagacatgtcttgaggctgtaagggctttcctaaacattgggagctcttcataagacagttgctactttccttaaaacagcatgccttaaataggcagtttgataaatcacctgtgcatatacttcattttagatgtgagaattgaaaaagaaaaaaattgacttcacaattctgcaccaaaagaatgagtttcacgaatgcgtcagttagaggtgctaatatagaacggttgctgagctctaaaactccactactccaccccactcccctgatagagaagtattcccagactggtttttgcctaaagccttgggtattctgaatacctctttgtgatttttttttctcttcctttttgagacagggtctcactctgtcactcaggctggagtgcagtggcgagatattggctcactgcaacctctgcctcccgggttcaagtgattctcctgcctcagcctccccaagtagctgggattacaggcacctgccaccacgcctggctaatttttgtatttttagtagagacggggtttcaccaagttggccaggctggtctcgaactcctgacctcaggtgatctgcccaccttggcctcccaaagcactgggattacaggcatgagccaccgcacccagtcctctttgtgacttttttgttggagtcattcttctgcgagctatggatatcatcaaggcaggcagtccctcaacgtggcagctgttcccacccttccctgctcctcttcttgcccaaggatgagcagaaactttacagaaaaagagagaattccctcaggaaatgaggcatgttgcttgaggtcacagggaatagaattagcaggaaaataaaccttgcaggaagcagaaagtgggccaaagcactgaggagaggacacggggagggcgtgagtttttgacagatttctctctgtaaaatgaggaggtcacccagggatcttgaaactcccttccagttccttcactctatgtcaaggattccagaaaggaaataaaataagctctgcttaaaaggcattttcaagctggggaactttgggatgaaaaagtttcccaaatgaagacatactggcacggtcagggttgagcgacttttgtgtatcaatgcacccaagcctgatgtctcattgtgggttatttccagctctgaagaagtactgcctggcagccagcatgacccactgcttctgtaattgctgcagttgcaggtgtcaacgcaaaaactccactcactcaattctcaaaatctatccaatatctctcatgccccttttcaatactataggaaatgtaaaaatgagcgacatagtcctgatccttaagagagtcataagttggtgaggaggagaaaggcatagatatagtcatggtaacacaagtcatatgtggtaagatctactgagcatggggctatcagagaaagcttcatgagggtgacatggaaagggagccctgagggactggtaaatttccatcagtgacattccagggagagaggccccaagacacaggggcagcaggtggtccactgtgctcctgccctggacagggagggcggggtcctctgctgtttgtttgcttgtgtaggaattttcccctcaaacaatgtccttgtctcccatgggagaagttttacatgagtgggaacctgtttctcttctctatcccaggccattccctgagagaagagaaaggggaatcttttttttttttggacagtttcgctctgtcgcccaggctagagcacagtggtgcaatctcaactcactgcaaccttcagctcctgggttcaagtgattctcctgcctctgtctcctgagtagctgggattacaggtgtgcaccaccatgcctggctccttttttgtaattttagtagagagggggtttttgctatgttgcgtaggctggtcttgaactccgagcctcaagccatccatctgcatgggccttccaaagtgctgggattacaggcatgagccactgtgcccagctgaaaagagaatcttaattcagttgattacttctaaaagttataagaccttcttcactgaaagagttcacatagaagctgaacttgaatccagccctcttaaatttcagttcaatattccctgcacatctgcacatctttacatgaattctcagtgatattccttcatccatccattcatgcatgaggattacagagatgaagaaagttccagctcttatcctcttgtgctcacagtttaacacgggagatgaaactgctgctgaatggctcccattctgaagtcagccaacagtgtttgccaatagcccccactgaataccccaccatattctcaagtaactcactcatttaggggaaaacaataatataattgtctctagaaattttaggtattctccactctaagattactcagtgttttgactgatctcaaggcgactccgtggtttgcttctgtcaaaaagaaaacacagttcccactgggaaatgtgtggagagtaatggttcaaaacgccagctgtacattagtgtatatccaggatgctttaaaaagtgatggccaagactcataagatgaattaagcggactctctggggaacagaaccgaacatcacaataccttcccttccagttccttgaatacttccaaatcgcacttaggattgaaactcaccaaattagagagatggaataatgatttccatggttggtctgattcactaggaacaggtatgctcaagcagtacttctcaacctttaatgcatttagaaatcatccagggatcttgtcacggagcaaattctgactcgggaggtcaggggttaccgcctaagattctggtgcaaacaggttccacaggaggcctatgttgtgggtgcatgaaccccattttgagtaacaaggctatcaagtcagagaataaatacgcattgcttttacccacacagaacttgcgactgaaatgagaaaataggctgagtgtgatagctcatgcctgtaatacctgcactttgggaggccaaggcaggaggatcccatgagcccaggagttcaaaaccagcctgggcaacatagtgagactctgcctcttaaaaaaaaattagaaaaagggaaaaccaatctgggaaagatcaaatattgatcaaacattgcaaataatgccataaatgatcagaatagggagagtaacatgctacctggagaactagaaaaaaaattctcagagaaggtggccctgggacctcctggctctgaatggtggttctgaatatcaggagaggggctggagaatggtgttttctagtgatgctgctggagtcgtgtacatggaccgtgttccatgagtagtgagctgaccaattagagagatgaggggtttgccaggacaactacataatgagccatatttcaacatacatgcagttttgtgtgtgtgtgccaagcaaatgagtctcagattctcggacaaaaacgaatacttttgctcagacagacagcatgtgagtgcttctcccccagcttcaaccctgcagtgtctacaggtgtcattggtccccggtagacgtcctcggttcaatgggtcactgatcacttatcaccagcaccacatgaccctggatggcagccaaagagttcctgggtcttgtttccctacctccacatttttttcctgacccagcccgagccacgtgcacaccacagggctggagtcccagtgcttttgtcctgacagcccattctcccactcccacacccaaccagttccccggggggtttttgaccagcagctccgcctgcagccctcgacccggatccaggcatcctgcttaaggaggggttcaggtggcaggaaactccagggcaacaaagtgtgggtggcatgggtggggttgaccggaaggtcactgtgctgggaggaagaggaacgggtggagggaaggcaagatacggatcaggagtattgacatcctgtgccagtagaggggcctgccccatggtggaaggtgtggccggatgagctcgctggcccatgtccccccgtttcccaggctttttcctcccacgctgtatgcagtgcaagaacaagctggtgcaattggactagcagcaattgagtccttttacccaaaagaagaagaaagagcaatgtttcaaaagaataaaaaggaagctgcagccaggtgcagtggctcattcctgtaatcccagcactttggggggccaagaggggaggatccctggagcccaggagtttgagaccagcctgggcaacatagtgagaccccacctctattttttaaaatgataattaattttaaataaggaagtttgtgaaagccattggtttctttattctaaagagcgtggaaaataggacagtctccaacaggccctgatttcctttggtaagaaaatgagcaaagctatagactaggaaacatgactggttaaagccggcccatgcaccaactccgatactgatagttatgtttcctttcgttcttatttgcttcaagctttgatccagaaaacatttgaacactagctagaaccaccacagtgaatatccattgcctaaatgctatctttcaggtattatgttcagacatagtattactttggttaattctcaaaataaagtaggtcatatgattatccccattttctgcctggtgaactgtggttaaatgggcttacagagattaaatgggttgcctgatgtagcccaacgaggaaggggctaggataggaagcaggcgctctcattccagaacctgccttttttcctcctgtctaaactgctgctaaaggtcaaagacaaaggtgccatgtgagcagggaagttatttttgttttttacaaaggtgaagtaataggctgtgagtaatgcccactgctccttcagccccaggtacatgcagtgaggcggtacccacagagccgcgtggcactcctcaacctgctagagcagccggcctcctgcaggatggcttaaggaccacctggtccttggggtctgggttctccgggtcctgctgttccctgcagccttccttctacccccagagcagcttgggggcatctttagagaaagcggcagtgtcgcacctgccccagcagccacaaaacagaggaaattctgagcacctccgggcgtgagtcaccataccacattcaggaattgccacctctgcccacagaatcacccactcttttctgtttgggaccaaaatagatacctccttcagaagccgctgctttctgtactctcagcaataaaaaaacaaaggctaggataggtgtgtgcctctgaggcgtgagggggggcgcgttttctcccctgggaaggttttcagagagaagttgttgctacagcagtacaggcagctgatgggttgagggtacaggaggaagagggaaagtcagggagattggagacaacctcttgtgtggtaggacttccggctattggtttgttcattcctttgttcattcattcattcagcaaatgttcattgaggaactgctatgtgtcaggcacagggtttgagacacagagatgaataagagcccatccttgacctctgcacagacaattatgacacaggctaagtgctgagatacaagtttaaagaaggagtcgatggaacacacagatcgatgttcattacccctgcaaaacccagcacatctcacatcagggactgcctcattcacatcatgttagatgtgacagagaggacagcagagagcgttgttttgtcatcaactactaaaattattaaaaccaaacaccactaattttgaacttcaggtagacagaggatgtagagttttcctttgctcaagaaattcctttacagagaaaatgggaacatttcaagtgggagtatttcaattcctttaataacaacctgttttctagctcccacattccccaagtattctagaagcacctttcataatggacagctctgaccaactgccccacacacatgcatgtgaaccgttctccaatcctaaaagtctgtgacttctccaaggaaaggaggaaggaatcgtattagtccagtttacattattatatactttgtagcaaagcagcaatgtttccttaaaaaattctatatatatatatatatatatatatatatatatatatatatatatagctgggcatgatggctcacgtctgtaatcccagcactttgggaggctgaggcgggcagatcacctgaggtcaggagttcgagaacagctgaccaacatggtgaaaccccgtctctactaaaaatacaaaagttagccaggtgtggtggcacatgcctgtaatcccagctactcagggaggctgaggcaggagaatcccctgaacctggaggctgaggttgcagtgagccgagattgagccactgcactccagcctgggtgacagagggaaactccgtctcaaaaaaaaaaagaaaaaaaaaaatatatatatatatatttgtgtgtattttctcctcatgaaatgagctccttgaagcaaatcggcccatcttttcagagaaagatcagtttattacgtcaccaagtaaagggcaaaggaatcatttctaaaagtttcgtttgaagtccccggagttaaagttgacgtcagcctcttcctgccctggtgccccgagagtttcccgggagttttggggatgacacccggctgcatgcgtgacatctcgctggctgggggcaggcctggtggcttccccgacaatgaaaccaggcagagcctgcaacccagctgagcaccagtgtggtctctgcttccggtccttgtggtagcacctctgtttacagcctgatttagaacaaaaagaacttttgtaaaggagaaaactccttatattaaatggaaagcaaaacaaacaattaccaaaaaaaaaaaaagttggaggggtgtttcagaataaaagagccgtctctccagacatctgtctgacgcccaggtggcgctgagaccacagggtgagccttttggctggagatgttgatccctggtttactgcacttcgggctttcactacctttcacccaccggaccatcagtttcactttccctctcccagcgtctctcaagctctgcttctctggccccgttttcaatctagtgcaagaggacctgtagccagggcacccatcctcctcctcctcgtcctgcactgggatcccagctctgagcactcccgggccagggaggccttgctgcgtgctctgcttctgtgatcttacagattcctcatggccaccataggagatggggactgttagcactattcccccaccccaaccaccttttttttgagacagagtctcactctgttgcccagactggagtgcagtggtatgatctcggctcactgcaacctctgcctcccgggttcaagagattctcatgcctcagcctccccagtagctgggattacaggcatgccccatcgccatgcctgactaatttttgtatttttagtagagacaggttagtagagaccatgttggccaggctggtctcaaactcctgacctcaattgatccaccagtctcagcctcccaaagtgctgggattacaggcttgagccaccacgccctgccaccattcccattttacggatgaggaaactgagaccatgaggcagtaattcactctcccaagaaagcaaggagccagtagatctgagcagaacccatgcattcaggccgacacaggaagcaagctgtcaacaggcactgttcatctcctgggcttcctaggcaggccctgaagctctggttttcagtcaccctgttattcatccccaagttaatctcccctgaaagcacctgtcgtgatgccctttcggctgcaagagctccagtcatttccattgcctcaggggcactttgctacctcctctgcctggcacacaacatgctccccagccaagactgttccctcagcacatagcacgccttggccagcaggtctcctcctgtccttcaaagggaacctcctcatttgtgatttcaaagctggactcccaggaacaccctcctcccttactggaacaatcttccccatcttgtctgcctaccggaatttttcccaaccagaaaagcgtcttgagagaatggaaaagtcttatgaatttggaaagttgacagcttgaattcaaatcctagcttgaacttgtgaatttctactttcctttacgaaaacctttgcatgccattctgtgcaggcactagcaaggtggtgggagggagatggatacagtagggtgagtgccgtgtaaagaaaagggagcaaagtctgggactgcagagaaatgccacaaagcacagacagaagagtcccggaggcttcccagagaaagatgacagccaatgggagacctccagggaaagcaggagttaagaaggtagaaatgcattagggaagtgtggcatgagcatgatggtcaatttcaatgtgtccacttgcctgggctaagggatgcccagatagctggctaaacagtctctctgggggtgtctgtgagggtatttccaggagacactagcatttgaattgaatagactgggtaaatttcttgttggtagactgagtaaagaaaatcaccctcaccagtgtggtggggatcatccaaccttagaggaccagaatagaacaagaaggcagaggaaggttgcattctctctgttcaagctgggacatccgtcgtctgctcttggacatttgcactcctggttctccagcttttggactctgggacttacagcagggcccctctgctcctcaggccttcagtcttagactgagccacaccaccagctttcctagttatccagctccagctggcatattgtgggacttctcagcctccataattgagtgagccaactcccattataaatattctcttatttatctacatacatcctattggttttgtttctctagagaaattctgtttccctgaataatacaatgaccaaggcccaagacaaaacacatggtgagctccaagagccacgcagagtcccgcaaggcaggagagctcaggcacatagtggaagcagagattttgaagttgggcatgagctgtgtcttggagtctccccatgtcactgggcttaaactgtgtcctggaaggaacagaacatcccagaggggtctcagtcagggcatggcttgtactttggagagacagcattgggtttatgtgaagaatgaaggaagaagagaaagcactgggtttatgtgaagaatgaagggaagcagaaaggcaaacccatagggcattgagtaacctccatggaagtccatgagggtagggttttaacctcggtgggcctcagcttctgttcgtataaaatgggaataacacagaccctgctgggtgctgtaaggctacataagctagcctgcctagagtgaccagagcacacagtaggtgctcactaaatgtgacttgctgggcttctagtctgcatggccaaaggcccttccctcggacctttccgtgtggatgcctcacaggctgctcagtctacacatccagaactgtcctccctccctggaacctactctttctcctctctttgctatctcaatgaatggcaccccatcctccccatcgcccaggaaatctgggcaaaatcctcatttcttccttgctgtcctccatgcacctaataatccagcctcaatttttggcaattccaacttctaaaatctcttaacgccagcaacccctcttcttgcttacttatcaccacccacctcaggactcccatgacagccttcctgtgatgcatgacgggcacatgacaagggcagttgagggtcaggggccacgggagcaggatgcagccagcacatgagggaggataggcgggaggacaggcagacacttgtgcgtaagagcacgcacttgtcaggctgcctgggtccaagtcctagctccaccactgaggggctgtgtgtctctgggcaagtcactgggcctctctgtgccttagttcctgcctctagagaacggagatgagaagaacacatcacctcataattaattactgcataagtaataattttaattatattgactattatactctattagtgtatgatgtcttttattatatatatttatcatataatatactaattatattaatgagtatactatagtattttatataacataccctaattgcttattatatatctgtataattattttatcatataagataatttcataagctaagatggtattttatatatttcatttattatatatttatatttatatactttattgtatttgaattgtgatgtctaataaaataatagatatgttaattatccttcatattcataataagctccttcattggtgtctgggaagccgagaacatttgtgcgtgtgagctctcctgtgtgttcggcatgcagtgtgttgcgtctcagctgacgtgattgctgtttttggtggcccggaggcacagggtgcatgctacaggcaggaagagctttggagcaggctgactcctgagctctcctctggtgccgtggcttctgaggcccccaggtgacaaccagcctttgccattctagtgtttcctctatgttcatcccgcgttctgagtgtggcacaggccacactcctgaccccaccagcatcaggtgctgtgcacatggtatgaggtcgggatggagtgctgttggcatgggggttgttccttgggctacctgtgtccacatggtctgattaaccccttctgcacatcagcaagggttcagcacctcctcagggttagggcatgcgcagggcatgcagggatttgagggtccttggacaatgcatgttctccatgcaagcatgcagagacatggagagggtctttgtccctttcagtcctaacattctgtggcttcataactacttgtcccacacccgagtaaaaagcaggatcttctcagcactgtgctgaggaagtctttaaaccttccagtaggacatgggatccctgcctgcatcttaagttcccatgtccttaggaaacgtggccaccttggaattcagctctccaagaagcccagtgtgaatgcccattgcaggagcatctgagctcacccccactaaccctgaggtatctgttgaaaagaatagaacccacccactgaaactatcagagatcaaatgttgtgtgttgactaagaatttgtgttaaggcagggatagttgagcaccaatgctttcaaggaactctggagaaatgcaagcctgtatttcctctcagcatggctgcagaagagggccagggcagcagacaggcattttgacccactcacagatgaatacaaagactaaactcagcaaaagccttgaggttgcatttatgtgtctgagaacagtccctggagcacaggcatgggcttttggtaccacgtaacctacaaccgtaagctctctgctctatgctgtccactccatcaatcccacagtgcctgaaatgtcattgtcttacccgatgtctggggtagcatctgtgaacacacggatttgacacttttatgatgctgtttgtctctactgaacccttcttaagcaaaatcacagtagactagcagatcatggtagtatctgaaagcgccaggaccccagaacctcaatcagtgctccccacttcccatggttttctccctgtgtttccacatttggattgtcattgtctgtgaaaaggcatgatccctgtcaacaacacacagtgtatgcaatgtgtgtcttgtgtaaaacggagtgtgaattcttgagagcaggaaggaaaaggggtacaagaggttcccctgcgagatgggtgaggagcagggcagagtgagcctggctgctgggaacccctgaggagagctctggagagggttctggacacgtgggcttggtcagcctgacaattaggatttgtgttaacaggaccggccctcacctgacaccaactggactgaggttcccaggagaaacacttagcatcatgactttggaggttgccatcatttttgatgactttttctttttccttcttttctgtttccctcttgtcaagtttctacctgtaagttatacttacttattttgtgtttctttacagtctcaggggaaattccgttgagttgaaaatttcctcagctcctcgctccagtttctcagaagagtctctctccttgcagaaaagactgtgggtgggagtcaccaatttagcatatttctactaaaaatatgactccatcccaagaaattggttttaaagatttgaggaaaaactgcttttagatttcagagaaagaaaaagagtgtgtttctacttcccccttttaaatctgataacttttattttaatcaggttgacattctgtggtgagcttgtggttaactctttcatgcccggaagcctgttgtcgaccgagaagactcccaggattagaacataaccagcgcccaacatttcatttgcagaagcatctgaggtcccaaaatgtgatggtttagcggcagctgcttgtaggggtatttttggtttcctgcttcttttttcccttctaagtaaagacaaaataactagatccctccaccccaccaccccatcatttcgttgttgtttaacaagtgttgagtaaggcacagttgttctccaaaagggtcttaccctgtgagttactcattttagggttacggaaactctgactatttgacccagtcaaccaggcctcagaaactgtgggtcagataacaaataactcatggtgcttctgtgctaattactgcagagatgtgtccaagtgctcggagatctcctccttgaagccaaggtctcctccttgaaccacaccgccttcttctcctgtcccgagggaatcaggcaacttttctttgatgacagcaacttccttaaatcccccaagccctgagacaggcactttacttctcccacatttccttcaacatttgtgcttgctgaatgaaacaaggaaggtgaatgtttgcttgaatgaaccaatcaatgggtaacagcaccagtgctaatgctaatacactcaactactcattcagaacctaccatggcccaaggcttgtgctctgctcttgggtgctgatccagcaaagagtgggtggagggggagtgggaggtgaagtccctataccaccacttatattttgcactgtcttattttttcctctggtcacatgcatacataaattttatatctctgtaattatgccatttaaaaatcttcctactgaggtagaagttgggactcaacccccgaggcagggctcagacatcggacaaaattgaggactagcaaaaacaggattggggcagaagcagctttccataagacatgctcatgagtgtgccatgtcagtttaccattgccatggcaacacccaggcgttcctgctcctttccatagcagtgaccggatgacccaaaagttactaccccttccctagaaatttctgcaaactgccccttaaactgcatgtaattaaaagcagatataaatatgaatgcaaaactgccctgacctactactctctgcctatgtggtcgccctgctctacagaagcagtcacggagctgtagcacagccggaactataacattgccacttcaataaagctgttttcttttattctaccactggcttgcccctgaattccttcctgggcaaagccaagaacccttgcgggctaagccccacctcggggctcgcttgtcctgcatcactaccaccttctctaggaagatgctctaggcttaatcattgtgttgaattcagctgctgaggactgagaggtgatttggatgattgacttcataaataaaattgggagttagactttccccgctgtggacttgccactgagttgggggagaggggggtttctttctctgataaagttccacatccacagacagaaggaaaaggccctgaactaatcacttcctttggaagaagctttggtaaagaattaacatttgggaggttgtcaagaaaaacctatttgttctataaatatttaaaaattattaaaatttcaaccaatacagaaaaacacaaagattaatataaccaacatgtgcccatcatcaggattcagtaaatgtttacagtttaccttggttgtttcatgtcctttttgtttattttaaatacatgctcttgtcgtgcgtgatggctgatgcctgtaatcccagcaccttgggaggccgaggcaggtagatcacctgaggtcaggagttcaagactagcctggccaacatggtgaaaccccatttctactaaaaatacaaaaattagcctgatgtgatgcaggcgcttgtaatcccagcttcttggggggctgaggcaggagaatcacttaaaccttggaggcagaggttgcagtgagcccagatctcgccattgcactgcagcctgggtgacagagcaagactccatctcaaaaaaaaacaaaacaaacacaaacaaaaacaaataaatacatgctgtagatacagtggagctccctctcggtccaacccaatctcattcttcccctccagtaattgttctcttgaatctgggctgtatctcatgatgcaatatacactactggtttgttttttattttatacataaatgcataatatactgtttctatttgcaactttgcttttttcactcagcagtgtttctgagattcatttttgatgtttattctttttaacaactgtacattattacattgtataataatacagagttcttgataatgccaagtttattaatctaaccttcttttgatggacaattagattgtatctgatttttccctattacaagcaatgctctaataaacagccttgaatgtgtgcacatatgcaagaatttctctaggaatatacctagaagtgagatcactgatcctagaacatggacagcttcaattttactgctatatttaaaatgttctctttgaaatcgctatgctaatttataatcctcatcagcaatttatgaaatttcctgaattcctcacatattcctcatcatcacttaccatagggaaattttaacattttttgccaatctgataatataaaataaaatctcattactatcttaagtttcattgatacctggtgatattgagaatgcttccacatgtttttttggtcatctctgtggcctccttgttcatatcctttgtccctatttttattgggttgttggcctttaacttattgatttgtaagtcttccttatgtattacggatactgagtctttggataagtatagattcttggatcttctaagtagacgttattacttataaatgacaattttattttttgttatccacttcttattcctctaatttcttttgcttgttccattgcattagctggggtgttcaatacagtatagaataaaagcaggaattgtatatgtttccaccattaaatagaaggcttttaaggtatcacgtacatgttattttctgtaagctttcagtgtctactgtctattggttaaataagtttctttttatttctactaccttaaaagttttttttcttttaatcaataatggatattcttttcatcatcattagatgctcttcttcatctattaaaatgattgtgtaggttttcttcctttataccataaaagtatttaagtacattgagagattttctaacgttaaaccattcactattgctgggataaactctgactgatcagaatttttttttttttttttttttttttttgcttaatacattgctagcatcaggtgcaaatgtgttaacattctccagtttgactgtagaattaatttctttttgtaattcttcaccttatcaaccatatgtattgttgagtgtatacatgttcaagattatcataacttccagaataatttttatttgtgaaaatgcctttttgatctagtttctcttatgttattgtagctatggagctttcttatatctggctaccttatcaacaatatgtattgttgagtgtttacagggtcaagattattataacttccacagtgatatttatctgtgaaaatacttttttggtctagtttctcctgttactaaagctatcgagctttcttttggttgctaaatatctgcatataatgtgttttccagccctttagttcaaccttcacatgtcactgtattttaaagacgtctcttgacataacaaaaatagaccttgtgcaggactttgggggaaatttttccccctcaatcagaatacctctgtcttttacaagcaagcttaattgatttatatttattgtactacatttggacttatttatgctattttactttgaacttttattaaccattatttttcttttactgttgtatttatcttttcttgtcttctgttaaattgattgagtttcctttattttctcttttccttctactggtttgtgtattatatgttttaattctacttttagaattaagtcaccattggccgggcgcagtggctcccccctgtaatcccagcattttgggaggccgaggcgggtggatcacgaggtcaggagattgagaccatcctggctaacacagtgaaaccccgtctctactaaaaatacaaaaaaattagctgggcgtgatcgtgggcgcctgcagtcccagctactcgggagactgaggcagaatggcctgaacccgagaggcggagcttgcagtgagccaagattgcaccactgcactccagcctgggagacaaagcgagactccgtctcaaaaaaaaaaaaaaaaaaagaattaactcaccctttaagttctcaaagtactcgtgatgttaaaagtccacagttaattaacatctctcccagttccaggatcttctgttcagaacttagcacatttctggcaactaaggattgacaactgttaaaaaatatcatttcccattatatttttggattggttgttgctgatatataaaaaatgttgaattttataaatgaattttctatctggccaccttatgaaactcttaatagttctaatactttaaccgtcttgggttttctaagtacttaattaaattcctcacatagaatgattatttttatcttctctttttccaacaattgtatgccttatctatgttaccagttttatcagatcactaataacgagggttcttttaaagtcaattggagtgagaaaaacccaaagatgccattaagtccttgagtgtctttggggaagaaaaggtaggtttaggaaaagagagacaaaaggcaaagtgaacaactaagacaataccatgtatcgcaaatttaggtgtgatttaatgatggctaagaaaaaattctaaattatatataaaagtgtattcgtatataaggtagtttaaataaataacaggtaatgtgggcaggcaacaaccatcaaaaatgactggaaatattcaaattcaaccatggtgatttggttggcagcaatcagagaattgactatgcttcagtagattgaaatccgttataatctattaatgtgaatacaggtgacaggaaacaaccgaatacagcattctcataaatagttcttagaatatgaattcaaaagaaactctatttcctcgttgtgacacaatcaagctttaagcaatgaacgctttaattattgtttttcagcttagaaagtaactatatattttatcattgggttctaaaaacaacaccgctcaagaggtcattgtagcaacaatcaaaatttgtggagcattttacagatttcaatgtcacttatgttatttcaactgatcctcatatttccatccttcataccctcacgattcatgcttcagcaaaacattctacctgtagtctcttgtatcttccatatgatgatgctgttttacacttttacacattctctgccagaatggcctgacgtgcctaacctgccagttgaactcccacccacctttcaggcaccttatagttaagagcagccttcattctgttgcctggctcatgggcaggggcaggattcccagcaaggggtactatgtcaagaggcctaaaaggacatatcagcatggtaaaaggaaatggcttggggtgtatgagaagctcctatggttacatgattgggaggaattcttttcatttcgtgttacagacggagcatctgaaatgagaagggaccacagtgagccagtgagtgaaagaggaggaagattctgacacccagagctttaccttcaacatttccttctgtttattccttatctagacttccattttcctaccccatagatacccactctttgcccctaacttgccttcaactcctctactgccttgtaaatgtcccatgtgtgcttgaaaaaagagtgggctctgctattgttggaatcaaatttgttaattgtggttatcacatttgattgttcttactgattttctgtctgtcctatccatcataaaggaagacactgttaaaatttctcattatgatagtagatttctaaatttatccttgttttgtcaatatttgctttgtgtattttgaagttatgttattgggtgcatagaagtacgtaagtgttatgttttcctgattcttgatttgtatattttgaagtgatgtttttgagtgcatacacatatagcatttttatgttttcctggtgaattgaatctttagcaatacgtactgacttctgtatttctattaatgcttctgccttgaagtctgatgttaatataactccttggattcaattgtccattcttttagtttcaaacttttggagcatttatgctttaagcatgtctcttataaacatcatataactgcatatttttaaaaatatatgcagtccaacattctgtaactgcagggttaatctatccacattgataattattactgatatagtttgatgaatttccactgtcttattttgttctttattttttaccttctctttctatgcatttcccccttcttttgatttaagtaagtttttatcctattttattttcttccaatagcttgtaagttattcactttactctgtcattttagatgtaatttttaacatcttaacatgaatccagactttacaaagcctagatttaaccaatatcatagccttcctctcaaataataaataaccttagaacaaattgcctccacaaaccttttctacacagttccctcctcttcctccttgcttctttgtgcgcatttatgtttgctatttgaaagaatttcctgaaagtaaaagtgagattttttagaaggctgacatgagggcagcaatagtagactttcacgtgactcctgtcccaccaccttgagctgtgtggtttagccaacttacttaatctctctgaacctcaatctcttgctttctaaagtggggatgacagtatctaccttccagagccatggtgagcattgaaggtaatatatgcaaagaagcagcacataggcagggctcagacatcatagttattattatatagataaccccaaatggagggcctgggccctctgacttcttcaaagataataatctgaactaaaccacaacatcacacaaacacctcccagcacccagatagtttagacatagctccacctctttgtaagagataaccttcaacagataggtgaaaagcacgctccttcctgaagattatgattctgggtgttggaaaagcactgaactaggagtcagggaacctggtgatctgttgtaatccaaggcttgccacaaacttgtggaatgaccacaggcccagtgttcttatctataaaatgtagaggttggcctaaatgatctttgagctctcttctagttctcatattctatgataccattaaaagggatgttctacatcccttttgcacccaaaccacttactttctatacggcctaaacttctggtttgggtttcccaaggaagcgagagacaaccttcaatattaggcatatctttggagttcttattaaacagtaaacctcatctcactatcaaagatagcctctggctccagcgtcctctttccagtctcccacagagatttcctctgggagtcaacgagcttaaggtgaaatttggctaggggtctgggaggaattcttttcatttcatattacagacagagcatttgaaatgagaaggggccacaggggggcagtgagcggaacaagaggaagattcgggtctctgacacccagaatctatctgattctgacacagaagatgaaccgcgttagagcaagaaccagatccctctttacccagtggcccaagctcttgatgcgtacctgtgtcccttgtaaagctcagtgaaatcatcacctagacatttcctgtgctccgtgcgttattctaatcttcactgggtacaagtagagcttaaagttctgatatatggacaggaaagagaagagggatgaagcctttatccagggctggctgggctaagagtaaaacaacttcacctggattcacccaaggggcagagaatcttatctcagactcggtccacatctttatcagcccccttttccctttatctttcatgttgctcacatgggctccaggggccagatgagttttctcttactttgaacatcagagaaaaaaaataacgacaaaaagttactcaaccgacaaacgtttctcacccacacacctttcctccagtcaatgacgtttccactgcaccctgttagacgctgagtgaggaagcatctgggcacaaaccgctgtggatgcagattgagcagcactcactgtgcactggagggatgggagtcctgtcctcaccaagggggcagatggagagggggcagagagagcagccggggcttcactccctggaaactctcatactccaagtgcggcctggggctctgcagccccagcatcatgtaggagcttgttagaaatagcctcaatgtccacacctgccctgacaaatcccagtctgcaagatcccgggggctctgcacacacgctgctgcgaacaacctcagcatccgtcctgccggctctagagcagccaaccgggatatccttcttcttcagcagtggtgtccgctctctaaaatgactgtcccccacatctctttccagggttggtatttctggttaactcaagggacacaaaaatagctcagggaaaaattaattttcattctactccaattctaataatgaagtggtaaaaattaaagggacagctttcagattatgggagtgcagctgcgggtatgtggcaaaatcgaagaaagagggctcataattccacgtcagggaagagccgctggcctgcccaggctgctgtttatctttactgtgaatggggcctcttttttgtttgtttgttttgttttgttttcacttaacctcagtggcaagaaaaatggggcctcttgccaggaggagcagagagtgacgcggaaggcaaagaccacctcatttcaccaagttcctcgtcttttatttgaaatccaagacatagaagctgcacatttgtccttctgggaagagtgacgagtgactgagagtggagtcgaacactcgaaaggagagagcaggtgcctgggagtcagaaaagctggcttgaattcctaaatctgtcgccgtttgtcctgggtgaggtcattctggtcatctgtggcaggaggactacaaatgcctggcttttccctttctagcgggcacacaaagagacagagaagttgaatctttagcaatccattgaaggggaaaccccacaatgcaaagagaagcattgtcgagggcccttcacctgcaccctctgttctcccagacctgttccatgatgcattccagaggaggtggctctccgtcactgtcacttgcgattgccaaggcgtcagccagacaaggcaaaagctcccaaggggtgttacccttcagctgcatacagaactcctagaggcaacaaatccacaaggaaagatacacccatgatcgtgtatttcagccacaatgatggaggtgaggtggaaaaggacgaggaacaagtgggattctgcccatgtctgtctaatgagcatccacagcaaactccaacggaagatgtgaaacacgctcaacactagaagaactcggtttgactctgtcttggtgtgggtcccaggccaaagccctcggcattttcaggattaatgatcactgctggctgtctctttttccctctgcccacataaaaggcacaaaaactaaagaggaaggccacatcaccgcagagcccgtggttcaggattctcctcctgggagccccgatttcttttcttttctcaccttaacagtgtccagagtacttttattgccagaatagagatatagcctgctcagagcctcatgtgcggcccaccactcaggaacaaagggagagacagatactaagcatgtgtgcaacagagaaaatccagcccacgaaaccgtgtgcaagagcagctccgtcctgcctgaatgtggctttgggaagcccacctagaacttggcctggcgccagtcacccactcagagcctactgccatgaaggcaggccctcactctccatccctgcccacacagggagacccagggcaaacagaaagtcccctagcgggggcccaaggaacccctggctctctcagggtcccattcaagtttctgggctagtcttgcagactaaataccactcagttgcctggtgggagtaggtgctgggcagggtggacaggagccccactgcttctcagccctgtgccaacccctttgtgtgagaccctagtgcagggtggggagccccaatttctaagccttgagtgtttaccaccctacacccccacctccaactcccgaattgatcatctcaaattttcccacagtccataggcaccagacacttcaaataatctcagaaaagaaggtgatgtctacatccagaatcgtgccaatactttaaaattacagggagaaaaatattccccttcccctcttctaaggaaaattctgtctgcctcccaagctcccaggtcccttggtgtgagctgggggagtgcgtagagctaggaattggaaaatattccgggagagaatgatttatgttgagaagacccattgggagaagcaggaagtgggtctggaaagacaggaggaagtgtaaaggcagagaaaagcccttgttagctgaattttgagaagtaatttttggcattgttagtgagtaaaactagagaatgaggacagttgtatgctgtcttaaaaaataaaagaatgataatatagggaaagatgatttcaacattttggagtcatataagtggaatcctcctgttattactgtgcaagacttttagacaaattattttttattctttttttggatgttgttctgttgctgcttttataacactacactgagaagggctaaaaaaaaaatcccaaatttattcctattagattgaaaaagagcaaccctccagcgtacctttccacacactcttctacctcctgctgccttcaggtgatgtttggcacttcctgacaaggcctttcagggaaaaggattatagccaagctctttagtggttactgagctacagacctggaggtgtcaagatcctaaattccaggaaagattctttatgaaaggaaagtctgtgagaataagaagttctggaacttccccttgtccccgcatgacctcttcagacactcgggctaatttatgatgactctgaaaatgcccatgacctcatctagaaaaacgcactctcatggaattcaagagtttctaagggcacaaaatagcttccaagacaatttgtttccttcttttcaaattgatgtgtttagaaatgttcttggcttgtgattgacatctcagattccaaaaacatctgaggtcaatcctggttatttgtgctaatgaataattacaaaagagtagctaaatatgcttctcgctcattttgttgagctaaaattacttataaagaaatgcatagatctgcggcatacaatttgatgagttttgacaaatgtgtacagctgcaaaaacgttttcatcacttctgccttctggtcaatacccacctaccacaagaaaccactgtctgctttctatctctggatataacttttgtctttttgtgaacttcatataaatgaaagcaaagtgtatgcactatttcgtgtttagcttattttgttcaacataacatttttgagatttatcaatattgcctgtatcaatagttcattattttttatttttgaatggtttctatagtatgactatatcataagctacttgtctgttctcccaatgatggatgtttgaattattgagttggttattattaataaagctactatgtactagaatggaaggggcttaataaaagaaagaagttactataaatattttataaaagtctttctgtagacacatcccttcattcctcttagataaatacctagaagtagaattgctgaattgtagggcaggtatatatttaacgtcaataaaaatactttctttttttgttttttttttgttgttgtttgtttgtttctttgtttgtttttgagacagagtctcactctgttgcccaggctggagggcagtggcgtgatctcagctcactgcaacctctgcctccttagtagagaaagggtttcgccatgttgaccgggctggtctcaaactcctgacttaaaatgatccacctgtctcagcctcctaaagtgctgagattacaggcgtgagccaccatgcctggccaaatactttcagatagtgttccaaagtaattacattacttacactgccaccagtaacataagagagttctggtagttctacttcctccccagtatttgacgtatcagtcttttatccatttcctccatttccccaatgggctatctcatcattgttttcaacttgcattttattgatatctgatgttaaatacactttcaagtgtttattgatagtcgtgtatcttctttggggaagtgattgttcaagtctttgcccatttattgggctgtttgccttttactcttgctttgtttttctttatatattctggacacaagtatttgtgacaaatatatatattgcaaatattttctctcagtctatcatttactttttcatttttttctttttttttttttgagatggagtctcgctctgtcacccaggctggagtgcagtgacgcgatctgggctcactgcaagctccacctcccaagttcacgccattctcctgcctcagcctccccagcaggtgggactacaggcgcacaccaccacacccggctaatttttttgtatttttagtagagacagggtttcaccgtgttagccaggatggtctccatctcctgaccttgtgatctgcccgccccggcctcccaaagtgctgggattacaggcgtgagccaccacaccctgcctactttttcattttcttaatgtctctggatgagtagacattctcaatttttttcttttatagtcagtgcttttgcatcctctatgagcaatctttgcctatctccaacttgcaaagtcatttgccttaattttcttctgaaatctttttagttttgccttttatggttacatctataagatatagacctagtacatagatctttatctttatatatataataaaattaattcttgcataagatgtgagtttttttctcatacatttatccatttgctccagaagcatttgtcgaaaagatttttcctttctcattgaatttccttggcacatttatttgtttaaaaaaaaagcagttgaacaaacatgagttgagtccatttcaggactttctgctctgtttcattactgtttgtccttatgctaatactacgctgccttgatttccatagttttatagaaagcctgaatatcagatgtcatgaatcctccaaatgtatacatctttacgattgtcttagatattctaggtcttttgtgtttctaaggagcttttagaaataacttccaaatttgtactaaaaaattgtgttggatttttaaactgtagttgccttgaattaattgatcaatttaaggtgaatagattttttaaatgaatgttacaatctataaagatagtatatttttccatttgcttaattcttttaaaatatgtctcagcaatatttcagagttttcagtttagtggtattacaagtttttggtaggcttatttacaaacattttatgttttttgatgtaattgtaaatacaattgtttttaaatttttaattttctaattggttgtgtcagtatatagaactaactacaagtgatatatatatacatatatatacatatatatatatatatatatatatatatatatatatatatatatactgaaattgctaacttgataaattctggtagtcattttgcagatccctcagtaattttatgtaaacaatcatgttatctgagaataatgttccttatcttgaaatctacttcctgatattaatataaccataccagcttccttatgcttatctttgtagattatatctttttctatcctgttttctcaacccatcatttttattgtatttaaagtgtgttctcttgaagacagcatatagttgggccctgctgtttaatccagtctgaaagtttctatctcttaaagtatggatttttgtccatttatatttaatgtaattactgatagggttggcttcaagtctaccttcttgctatctgtttcttagctgttccttttctatttttattactctattcttccttttctctcttcagtttggctaaccaaacaaatttaatattctttttagctacactctttgtggtattatttggtggtttctctaggctattcagcatgaatccttaacttatcactatctacttacttaatattgtaccattttctatatgatataaaaacctaaaacagtacaattccattctccctaacttttatactaggactgctgtatattttacatttacatgttcaacagaacccaccataccatattattatttttgttttaaacagttgtctttcaaagatgttaaaaacaaaaagtggccttttcacttatctaaatatttacgtgttctttattacttcatgtcgatttatgtttctagctagtgtaatttctcttttgcttgaaaatttttctttagtgtaatgcagatgtgccataataaattctctaagctttcttttatctgaaaatatactaaattcaccctcatttttagaggatattgtctctaggtagatttcaaggttgacgggtttttttcttttaaaactttgaatatgttgtgccattattttctgcttctattgtttctgttgagaagtcagttgttattcatcatcgttccgctgtaggtacgtgtcctttccctctggccacttttaagattttctcattatctttggttttcagcagtttagctacgatgtatatagatgggcttttctttatacgtatcttgcttggtgccgtgaacatctggatctgtaaatcagtatctgtcatcaaatttcaaaaatttttggccattatttcttcatatattttttctgctccattctttctcttctctatcattgggaattcaattaaatgtaggttaggctatttaatattgtcttacagcatgccaaaggtccattctttttcagatttcttgtgttcatcagtttggataatttctattgatttgccttcaagccccggctaggctcatttcagatattgtaacttttagttttaattttttatgtttaaaaatattggctgggcacggtggctcacacctgtaatcccagcactttgggaggccaaggcaggtggatcatctgaggtcaggaattcgagaccagcctggtcaacatggtgaaaccccatctctactaaaaatacaaaaattagccatgtatgatggcatgtgcccgtaatccaagctatttgggaggctgaggcagaagaatcacttgaatctgggaggcagaggtttcagtgagccaagattgtgccactgcactccagcctgggcaacagagcaagactccatctcaaaaaaaaaaattacaagttttcatttatctgctgagatatcctgttgtttcactcattataaccattttttctttaaattagcagttggcaattttttttctgaaagggccagagagtaaatattttaggctacctggcgatgttactccactgcaactactcaactctgccattatagcagaaaagcagccatagacaaaatgtaaataaatgggtgtgtctttcttccaataaaactttatttataaaaataaaccactgaacacagtgtctcactcctgtaatcctagcactttgggaggccgaggcaggtggatcacctgaggtcaggagttcgagaccagcctggcaaacgtggtgaaacctcatctctactaaaaacacaaaaagtagccagacgtgttggcgcacacctataatcccagctacttgggaggctgaggcaggagaatcgcttgaacccggggggcagaggttgcagtgagtcaagattgcaccattgcactccagcctgggcaacaagagcgaaactctgtctcaaaaataaataaataaataaataaataaataaataaataaataaataaataaaataaatggcagcaaatctgcaggtcatagtttactgacctctgctttaagtcattgagtgtaattacaactgttttaaattccttttgtgctaattccaaaatctaggtcattttaggggtcttttttttttttttttgagacagactctcactcactctgtaacccaggctggggtgctcggctgactgcaacctccacctcccaggctcaagcaattctcctgcctcagcctcccaagtacctgggactacagacatgtgctgccacactcggctgatcttttgtatttttagtatagatgggatgtcaccatgctggccaggctggtctggaactcctgacctcagatgatccgcctgccttgtcgccccaaagtgctgggattacaggcatgagccaccacacccaattttacgggtctgtttctattgagcacttttttgagtaggtcaagtatgtcacattttcctgtttcttcacatgtctagattttcttttaatttgctggatattatgagctatacattataaagggtctagattatcttatggtcctttaaaaggtaatgcattttgctctgccaggcagttaaatgactagcgcatcctcttgtctattaggcttggttttaatctttgtaagggcaggtctattttggttttgaaattcatcctagggatgcctctttctctaaagcaggattggaaaactacaacccacagctcagacacctgtttttataaataaaacttagcataactcttcttctctcagccctcacaatggacaatcagggctaagtttcactgagttctgccctgttcaggttcagaccagctcttggctaagaacctgaggtggacccctatacataattttggggcgaccttcatgcagtgtcctctccagagccccaccccacaaatcccagtcatgtcacgtcaatgaaaccactctgcttgggttccacctgggtgctgccgggaaggaaagcaccccaggaaggaagccagggcaactgtgggcgcctctcacgtgtttccctcctccaaaatcatgtagccctgagctgcctgttgttcagcacctgaaagcacttgctgtatacatttggactggttttacagctgtttcagcagaaacgtaagttttggtcccagttactctgtgatggctggaagcagaagtcttcactggtttttctgattattatccatgtcttgctttagtaacagatttatcttctgatacttaaaatattggttggtgttgatccataataagtgccaacaaatggtaccagtgatatgagaagtacagagagacaaacttttgcaggagttaaaggttaaggtaaacttcagtccagtctctatctgaattaccattctcttcttctggacagtgagaaaaaggaaaggaacagaactaccatctattccatacctgttattttccaggctttcttcaagttaccttagtatattatttgctataatcattaaatcaataaaataataattattacagcacgaagctgagccttagagaagtaaaataataaaactatgtagcttgtaagctgctggagctagaagttagaaacccatctttctccttcccaccatgctgctgctcttgccttatcatgagattaccagcatttattgagcacttatgttgcctgttccactgtaatttctggcccatggagcccatttaaattgcttttgcttagtcccttgttggttagagatgggccaagctgtctgatttctccctatcttcgtttttttttttgagacagagtcttgctgggtttcccaggctggagtgcagtggcgtgatctcggcccactgcaacctctgcctcctgggttcaagtgattctcctgcctcagcctcccaagtaactgggaccacaggcacatgccaccacgcccggctaatttttttgtatttttagtagagactgtggttttcaccatgctggccaggctggttttgaactgctgacctcatgtgatctacccgccttggcctcccaaagtgctggaattacaggcatgagccattgcacccagcctccctaccttcagttcttaggggagacaggagagtcctgagccattggatggggatggtcttccggaggacaaggtgctgggcagagtctaagggcacagagaagcttcactcaacctgaatgaccaatacacaaccggccaacccacagccataagtacagccagcagccctgatcagcctccgtgtgggcttccattgacggagaggccacagactcctgctttcctgcctcttcctgtccctgtcatctccccgtccacttcctttatccagcatgtgatatttccccccaaaatctaatctcttagagcagagaacttgttgcaaagtaggcaatggaattatttttctgattagacctgtgccacttttccttttaatagtttgatgtttgaccactgcttctggtgcctttagtgagataccagagtccatttttcaggctgagggagggtaaggtcttcataatataagaaggtatttggtgaactcagaggtgggcaggtgggtgagaaatacacatttcctatttgccagacattgagtgaagcactttctgtatatttctcaaaaaatggcgcacagtcattaattatagaaagtctaacaactcgtatatccttaaaagtatcttgcacagacatattttgcccctcaattaaatgtacgtaactttgcttcttcctttcttcacattccttgaccctcctctctccatacttgcttgacatgaggcatattcggaataaaaccttgttaatttctactcatctagtttgaaatacattgtgctttggagaggagcttggttgtagttaatttttgagccagctctgatacaaagctttctaaagaacaatggtagcagccttagttgctttctcacaaaaagtagggcataccatcttttaaataaagtgaagaaatatgtgattaagtcattataggattaaatatgtgagtacttgcctggggcctcttgagttcctaataggcttcttttgctttgcagagctctgtgacgatgacccgccagagatcccacacgccacattcaaagccatggcctacaaggaaggaaccatgttgaactgtgaatgcaagagaggtttccgcagaataaaaagcgggtcactctatatgctctgtacaggaaactctagccactcgtcctgggacaaccaatgtcaatgcacaagctctggtaagtgtcccttctgtgactaccaagaacaaaagaactgcagcaaagagtgagacagagcccagcttttgttcactcagccctatagacacaaatgggccagtccagtctacaggataactaattttagtggttcctgaaaagtcattcactaaacacaattttttttttttttggagacagactctcactctgttgcctaggctggagtgcaatggcacgcgatctcggctcactgcaacttccgcctcctggcttcaagtgattctcctgcctcagcctcctgagtagctgggattacaggcaccctccaccatgcctggctaatttttgcatttttagtagagatggggtttcaccatgttggccaggctggtctcaaactcctgaccttgagtaatctgcccatctcagccacccaaaatgctgggattacaggcatgagtcacagtgcccggccacacaattttatttttatttttgagacagtctcgctctgttgcccaggctggggtgcggtggtacaatctcagatcactgcaacctccacctcctgggttcaagtgaatcttgtgccacagctgcccaagtagctgggactacaggtgtgcaccaccatgcctggctaatttttttatttttagcaaagatggggtttcgccatgttggccaggctggtctcgaactcctggcctcaagtgattctcctgcctgggccttataggcgcacaccaccatgcctggctaatattttgtattttttgttagtgatggggtttccccatgttgtccaggctggtcttaaactcctgggctcaagcagtcctcctgcctcagcctcccaatgtgctggaattataggtgtgagccaccacacctgacctagacaccctcttttatcctgagctggaatactgatcacccccctcactggggcactcagactcaactcctttgccaaactcttcacaatagagagggctgttctagaagtttccttgtcattgtgttaagatggcgtctctaacttcaagcattctgaacagccttagggagcaaaggatcagtgtgttgtggagtgagaccactcctgctgctgtcaaacaacacagagacaattgacagcaagcaaggagtcccttttggtgagagacacacacatgcacacataacatacatgacatacacagacacgtaacatacatggcatacacagacacgtaacatacatgacatgcacagacacgtatacacacgctcaaaaacatgtcgtgggcattgccatatgcacttgaatacccagaggccggtgctgggagggcatactctggtttcgtatttgtaagctcagcagccagacaccaccagacacatcgtgggccctggacaggtgtgcttctcaagtgaatgaatacatgaacagtgttttctatgaagcatttgtgaaattatctgcatcattccatctatattttctagccactcggaacacaacgaaacaagtgacacctcaacctgaagaacagaaagaaaggaaaaccacagaaatgcaaagtccaatgcagccagtggaccaagcgagccttccaggtgagagatgattctgtcctccagctaactcctgctagcgcacccttctcctgcaggcagatgatgtgtacccaaaggaagaaggtctgccctgccttctataaacacatgcatgtggctccgtcctcccaagacatcattgcagacaagaattagtgcagagttgctcagaggctgtttgctcagcaactaaagccaatctgacggcagccaatccaggtctgggcttactccctggtttggtaactggccaaatagaattcaacccaaattcaactcaacttaaaagcgtctgttgggtctgtgtgccaggccctgctgatagaagacacaaacaagagtgtgacaacgatccctgccctcaaggaaacgctctgcgtcttccccttaagcacaagacaacgcaccgcaaaaaaattacttgcttcccagtatttcttccagggcaaggttgtaaaatgtgcatgccacacttgtgagtctcaaaagctccagatgcgtgtgtcctggccagcagtctgtgcatgagtgggcactgtggctgtcccttgtctgccctctgctttcccatgactgaattgggattcagttatggtgtcaagaaaatgggctgggcgcagtggctcacgcctgtaatcccagcactgtgggagtctgaggcaggcagatcacttgaggtcaggagttcgagaccagcctggccaacatggtgaaaccttgtctctacaatcatacaaaaattaagctgggcatggtggtggatgcctgtagtcccagctactcaggaggccaaggcatgagaattgcttgaaatcaggaggtggaggttgcagtgagcagagattgcatcactgcactccagcctgagtgacagaggaagactctgtcccccctcaaaaaaacaaaacaaaaaagaaaaaaaacccacagaacctgctaggaagaattgagctttctaaggtcaggctagccttaggagacttcagagccctttgctgattttacaaccttacaaagaactgtatcagataccatcccatttgagcctggctatacaatgagtcaggaccaggaagggttacttcaacttactgaagaaactgagatgcacaaaagataaaaagatttggttaagctcacatagtagggctggaatcagacctcaggtctcccagattagatgaggaaactttctgctgattacttattttaaaagagtttgaatttacttacagcttccattattttattttttaaaacagactaatctaggggcacagttgcaacatgatgctcttactccttccccttccgactttgtcctggaatggtgtttccaagcacatttgtttgttttgttctacttcccccatatcaccctgcacagttattggaaggcttcaaagaggccaatgcttgttgtccgaaggtggctctgcctgagggatgtttcaaagattgtctcagtttgggtgttttcattggaaagaagcaaacccaattcaaacatgttcagacagttacgaattgtactggctgtcaaacaaccttttatcctgagaccaaaacacaagttcagtcgtgatgttcaaggtgccacatggcaggagccagcctgggacagggccacccagcttcctgctggggaagaggctctggaggatatttacagaggctctgttgggtatgcagggttggggagagtctggaagttcagagcacgtgcgcagtttcacaggctggggttagagggcacatacaattccatatgtccaggttgggggctgtgggtggggaattcagagatttaatcagaacaagacatggtctcaggccacaggtccgtcaggcctgggatgtagttgggtgagtggaaagttctggggatgggaaattttgagacgtcttgaaagggcgcatgtgtgtcaaccttcaggtgtggcttgatcagagatggtgctccatttctctgaggttccctcagcccgtccctcctcctggctttggtgttgtccccaatccttccgacatcatcccaagatgcccagccgctgcccccaagaatgcacttcctcacttgtccagcagaaatccaaggtggtcttcatgctccattggcccaaataggcttgagcctacccttgtgtctcagctgagactgccccgcccactcctgtccactgtcaacacctgcactgtcttccaagaggcagttgtggcgttcctgtctcggggccgcaccaaccagaatgaatcgctcattcctctgtgttcccattgccaacgtctgctatccttcacatgcctttcttacccaatccactgtccaccccttgcaggagtgacagggtcttcgtgccttcctacagggcctagcaaacttccccacgctcagacgttctcaacatatattggttgaatgaaaggatgagcaagcagtcaagagagtaagaaccaaggtccagtccctagcaagaggcaacctggactcactcgcggtgctgtccccaacttgccttcagagcgttccttccatcttccaggtcactgcagggaacctccaccatgggaaaatgaagccacagagagaatttatcatttcgtggtggggcagatggtttattatcagtgcgtccagggatacagggctctacacagaggtcctgctgagagcgtctgcaaaatgacccacgggaagacaaggtggacccagccccagctcatatgcacaggtgaaatggagaccagtcagtttccaggtagggtggctcccttctggggtccacaatgttgctttgctccatcaggctgaccagggtggaatccctgaccactcctgctggacaagagtggtccttggacaagacccttgatctccctgggcttccattttttctcattctgagaaaaaaaaaaaatttaaatagaccagatcagatggactctaagggctccttcaatgaaggtccccctgtgccctgagtggggagaaaggttggagacagaagagaaggaaagccctctcctaagcaccctagatgctgcctcgtagttggtcctaagtccactacttctctaagccaccaaggcctcctctggctccaagggcaagtccagtttcccactcacacatttttcctcttactggtgatcgtgtaaatgcatgatctgaacagccctccgcggtcagcatgttccttccccttgtgccattccccagctgagcttgtaaaaataaacataaaatgtgcagagtcgggacttactcagtgcacatgcgcgcacacacacacacacacacatactcatgcaaatgctcagcccaccgatgtcgaggtctcctgctgtcttccttctgaaatcttattagtatcacgacaatcaaaagtgacttacatgcaggctgggcacagtggctcacacctgtaatcccagcactctgggaggccaaggcgggcagatcactttaggtcaggagttcgagaccagcctggccaacatggtgaaaccccgtctctactaaaaatacaaaaattatctgggcgtggtggtgggtgcctgtaatcccagctacttgggaggctgaggcaggagaatcacttgaacccaggaggtggagttgcagtgagctgagatcacaccactgcactccagcctgggcaacagcaagactccgtctcaaaaaaaaaaagtgacttacattcaaccacaagtattcctggttttcttgctcactgcacttctcatactccatgtccttctcttgggttccctagggaggctgttttgttcccttagctgcttccctgggccaccctgacagccagggaatgcttgctgcttccttggaagagggtgagaggcagggcagagccagggttgctgacccctcaggagaagtggagagcctggcacagaagcagctgtcccttagtgcatctctgctccatccagtggttcaatggcattcgtattattatgacctgtttccaagtcacagatggaaaccaggactggggagggaggctggggagaaagcattgctcagagttttggggacagctagggtcagagttagaattcagcctcgtctgctctgctgagaccacttcaccgcttcccagtgcccctgctgtggaaccatgtggggtggcatccctggcgaagtgcccacaccaggattcctgcctcctcgggcgtgtctggggccggctgcctggggcaggcggggtgggagtgaggccctgactcctgtgtttagctccaccagcatcacttactctctcccccaggtgaagagaagcctcaggcaagccccgaaggccgtcctgagagtgagacttcctgcctcgtcacaacaacaggtgcgggagaagacaaacgctggaccacagaggcctagtccaaaagggcaggggtgaccaggagccaggctcagggagataggcggaggtgacctgtaggggagaagcccacagcagcctcctctccctctgagcagggacagggcctcagcaacctgcaggccccaaagcaagtgtcagaaagagggaacccaggaccaggaccaagcacggtccccaggcagagatggaacaccttccctcaccaccaccacgtgtctcccaccagcctctgagcttctcattcacagagacaccctgacttcctttagcctcgtgctgtcctaaagtcacggtagcaggagtgtctctctttatctctttttcacagattttcaaatacagacagaaatggctgcaaccatggagacgtccatatttacaacagagtaccaggtagcaggtgagtggggcactggctttgtggacaaaatgtacaccaggctgagatatggacaggttgactggttagtaggttggttagttggttggctggtaggttggttagttggttgattggtaggttgataggtaggttggctagttgattggtaagttggttcgtaggttgggaggttagttggttagttggttggttgcttggttggcaggttggtttgtatgttggtaggttagttgattggttggtaggttggtagattggcaggttggtgggttagttggttagttggttggtaggttggttggcaagttgataggttggttggtgggttggttgataagttgataggttggttggtaagttgataggttggttggtgggttggttgataagttgataggttggttggtaggttggttgttagggtggtagattggcaggttggttggtagttttgttggtagtttggttggttagctggttggttggttagtgagttggttggtagatagattggtagattggttggttggttagtttgttggtaggttagtaggtttgttagttggttagttgattggtaggttggttggttgactgaaaggaccccttccttacactgcagaatgtgtgagtgaaagactaatccagatactgacgtaactcagaattcgcatgaaccagttacaggatgctgtgagcaaagtctcaagtcagccctatcagctcctctcaagctgatctggaagggctgtaccccgggcctctgccaggggtcaagagtgggaggaaggagccacgtagccagtcagagaggacaggcttccagaaacactgccattgtttcctggtaggagggaaaaacagactctgagtctgcatctgcctagaaagtaaacaaatgtcagcctccaaaacctcagcagagcagcatctggaaaacccgacctctttcaggagatgttaatgtgcttctcatcatcttcatatttcaacatttcttttaccaggcgctctcggtgtccttaaacgaggcctggcctctgagcctttctgaggggcttttgtgagagaagggtgcctcctgaggggaagctccctccaccctcaccctgtcctccctgccctgttcctcaagactcctaggaaatcccatggggagggacctacttcctgagacagggaagagaggctgcagcctccgccttgctctttggggatgtcctcagcctgccctgtggccctggctcctgctgcccccatgccaagcccagggccctttgctgaactccctctctctattgacagtggccggctgtgttttcctgctgatcagcgtcctcctcctgagtgggctcacctggcagcggagacagtaagtgtggcatcaccaaggcagcccttggtcagatcaaagtcctgtacccagccccaccctgcctcccccctaccccctccatgctctctctaatcacctgcagttcagggagtggcaaagggagaggccaatccatgcctcggaaagagtcagttaaaaagaattaaagcaccgccgggtgcagtggctcacgctggtaatcacaacactttgggaggccaaggctgagtggatcacctgaggtcaggagtttgagacaagcctggccaacatggcaaaaccccatctctactaaaaatacaaaaaatcagttgggcatggtggcaggtgcctgtaatcccagctacttgggcggctgaggcaggaagattgcttgaacctgggaggcggaggttgcagtgaacagaaatctcaccactgcactccagcctgggtgacagagcaagactctgtctcaaaaaaaaaaaaaaaaaaaaattaaacgaccagggaaatgggaaggcaaaggagcctcacattcattgagcacccactatacaccaggcttgatgcttgttttataaacattattgaaatctaccttctcagaaacctttggaatagctgtggcctagagagatgcaacagcttggagaagatggcacagcagaggccagcactgcaacatgaatctagagcccatgattttcccacccagcccctacctatagaggacccagggcagcatctatgctgagctttgcctatcctgtgctccccaccctcccgtccacagaagctcacaccggcatccccttgaccaggaatgtaaaccatgtgtggtctttttgcattaactcagattttcaaccctgcatgcatcttagaacatccaggagacagtcttctaaaataccagtgagtggcaagatatgagtaaattccacaggaaaaggaaggcagtccaaagggctgtgcttctcctgtggctcagtgttattcatagctgtgacatcttttaagagaggtttacaagagggaaatcctgtcaccaaaaccattgtgacccactttgaatttggggggaatcttcatttgcaacaatagaagaacaaatttgttgcaataggaaatatttttgtagcttatgtaggttgttcagccaaaacagcataataatttaaaaagttaaaagatagcccaggagttgtggctcatgcctgtaatcccagcactttgggaggctgaggcaggtggttacctgaggtcaggagttcaggaccaggctggacaacatggtgaaaccctgtttctactaaaaaatacaaaaataagccaggcgtggtggtgggtgcctgtaatcccagctacttgcgaggctgagacaggagaatcacttgaacccaggaggcggaggttgcagtgagccaagatcgcgccactacactccagcctgggcaacaagagtgaaactctgtctcaaaaaaaaaaaagaaaaaggtaaaagatatcaatgattgggctccagtcagaatgtctgggggtgagcccaagacatcagtacgtatttttaattgagataaaattcatcatttaaccatcataaaatgtacagttcagtggtgtcttagcccattttgtgctactgtaacagaatgcctgagactgggtaacttataaagaacagagatttataaagaacagagatttataacttataaagaacagagatttcttaccattctggaggctgggaagtctgaggtcgaggggcccccatgtatcaagggcgtttgtgctacgtcatcctgtggcagaaggcagaagggcaagagagtgagagacagcaggaggggctgaactcagcttttatcacaaacccactcctgcaataacaacattaatccattcatgaggcagagccctcgcgacctgatcacctcttcaagatctcacctgtcaacattgctggattagggattaagtttccaacacctgagctctgggggatgtattcaaaccacagtaagtggtatttagtatgtttgcaatgttgtacagccatccccactgattccagaatacttccatcattcccaagagaagccccacactgccaagttccccattctccccagccccgggaaaccaccactctatgttccgtctctatggatttgcctattctggacatttcgtgtaaatggaatcacgtggccttttatgtctgggatagtcgtacgttttaaagcccctcagatgtatctaatacatatgcatccaggtttgacaaccctacacccggccattggttttcaaacttgaactagcaccagaatcatctgtaggaacataaagaaacgataaatgtttgagatgatggatatgctaaataccatgatctgatcactgtaccttgtaggtatcaaagcatccctacatacctcataaatatatataactattatgtgtcaacttaaaaacatttgttgaaagaatcatctggaggccttgttaaagcacagattgctgggtcccacctgtggagtttctgacgcagtcgtcttgcttaggtccaggaatctgtatttctatcaggttcccaggtgatactgacgctgccgttccagggagcagactctgaggatcaccgcactaggctaacagcattaagaatcagggaagctggccagactcacgcttgtaatcccagcactttgggaggccgaggcaggcggattacttgaggtcaggagtttgagaccagcctggccaacatggagaaaccctgtctcttctaaaaatacaaaaattagctggctgtcatggtgcgcacctataatcttagctactcgggaggctgatgcaggagaatcgcttgaacccaggaggcagaggctgcagtgagctgagatcgtaccactgcactccaccctgggtgacacagcaagactctgtttaaaaaaaaaaagaaagaaagaaaaaagaaaagaaagaaaaagaaaaagtaaactctagaaactccctctgtctctctcttgattatccagggcctccctgacccctgccagcatccactctggccaaccctgatacaaactccacagtaagaccctgagaaaatacagatccactcccccaaaaccaaagcccttagcccagccagagagaaaaataaaatatctcttcccttcttatatgggtcatcaggtccataacatactcctaattttcctcatgggaattaaaaagtataaattactgcagtgcaaatgataagccccctagggttattgtagcaggaatgattcatatacccggcagtctaccagtttctctaaggggttagctgactcctaaggtgtcattttaggcttccaggaggggaaggatgtgacgtggctgacatgttgtacgtgtactcagtacttgcatcctctccttcctcaggctgaacacctgacaagccttaacaccttgcaaggatttttttcatttgttagtttgaagatcaaaagccttcgggcccagaggacaaagctatttggaagtaggaatggttcagtgtttatgttgtgaaacaaataactgtgtgaacctatgtgagttcccacaaggtctcccagaactacaatctttggggagactcaaacatacatctagaaatgacccctctagtcagtttgtccaaaagccttcctagaatctgatatcaacccatggtgccctcttgtggcaacagaaatgctgcatttgaattaccgaaagatcactgtagcccagccagagagttttggttggggaaatattttttgtttgtttcgggcaatgaccaggagcccgtgatgtgctacagaaggctcacagtggcttgtgagagccagcggttaaattttcgggacttctgcaaactggtttttaagcatagccattatggaaaattaaagtatttaggctgggagcagtagctcctgcctgtaattcctgcacttcgggagactaaggtgagaggctcgcttgagaccagcctgggcaacaaagtgagaccttgtctctacaaaaacattttaaacttagctaggcgaggtggcacatacctgtagtcccagctactggtaagggcgaggtgggagaatcccttgagtccagcagttcaagattgcagtgagctgtgaccatgccactgcactgcagcctgggtgacagattgagacgctgtctcaaaaaaaaaaaaaaaaaattaaaatatttaaatttacaatttaataaattatattaaaaacaaaggcaagaattacttacaactgatcacttcctaattatttgctaccttttactgttatctttgttcgctgggtggtttacatctattgtgtccgcatggtggaaataccgtttgacggtggctaccgcgcatctcttcccaaccgcgtgatcagtgatgtcacattgccagctggaagctgtgtgtggagggaggattgacaccagggaagacaggcaaccgtcatcagagagctgcttgttaaacatcaccagcacacctctgcttggagtcttgtgctatgggaactctgtgcaaagtagggagtaattagaaattcccatgagccaaataagaactgggaaaaggctaagaccgtattgtccaatacagtagccactagccacctgtggatacttaagtgtatttaaactcaaataaattaaatacaattaaaaattcagttcctcggttgcactagccacatttcaagcgttccctagccacaggtgtctgtgttatcggacagcacaactgcaaaagatttccatcatctcagaaagttctatagcacagtgctggctagaaaccaagtgctttactgcatgcacatcatttagcacagttagttgctgtttattattcctgttccacagctattgtctgccatataaaaacttaggccaggcacagtggctcacacctgtaatcccagcactttggaaggccgaggcaggcagatcacaaggtcaggagttcgagaccagcctggccaacatagcaaaaccccatctctactaaaaatacaaaaattagccaggcatggtggcgtgtgcactggtttagagtgaggaccacatttttttggtgccgtgttacacatatgaccgtgactttgttacaccactacaggaggaagagtagaagaacaatctagaaaaccaaaagaacaagaatttcttggtaagaagccgggaacagacaacagaagtcatgaagcccaagtgaaatcaaaggtgctaaatggtcgcccaggagacatccgttgtgcttgcctgcgttttggaagctctgaagtcacatcacaggacacggggcagtggcaaccttgtctctatgccagctcagtcccatcagagagcgagcgctacccacttctaaatagcaatttcgccgttgaagaggaagggcaaaaccactagaactctccatcttattttcatgtatatgtgttcattaaagcatgaatggtatggaactctctccaccctatatgtagtataaagaaaagtaggtttacattcatctcattccaacttcccagttcaggagtcccaaggaaagccccagcactaacgtaaatacacaacacacacactctaccctatacaactggacattgtctgcgtggttcctttctcagccgcttctgactgctgattctcccgttcacgttgcctaataaacatccttcaagaactctgggctgctacccagaaatcattttacccttggctcaatcctctaagctaacccccttctactgagccttcagtcttgaatttctaaaaaacagaggccatggcagaataatctttgggtaacttcaaaacagggcagccaaacccatgaggcaatgtcaggaacagaaggatgaatgaggtcccaggcagagaatcatacttagcaaagttttacctgtgcgttactaattggcctctttaagagttagtttctttgggattgctatgaatgataccctgaatttggcctgcactaatttgatgtttacaggtggacacacaaggtgcaaatcaatgcgtacgtttcctgagaagtgtctaaaaacaccaaaaagggatccgtacattcaatgtttatgcaaggaaggaaagaaagaaggaagtgaagagggagaagggatggaggtcacactggtagaacgtaaccacggaaaagagcgcatcaggcctggcacggtggctcaggcctataaccccagctccctaggagaccaaggcgggagcatctcttgaggccaggagtttgagaccagcctgggcagcatagcaagacacatccctacaaaaaattagaaattggctggatgtggtggcatacgcctgtagtcctagccactcaggaggctgaggcaggaggattgcttgagcccaggagttcgaggctgcagtcagtcatgatggcaccactgcactccagcctgggcaacagagcaagatcctgtctttaaggaaaaaaagacaagatgagcataccagcagtccttgaacattatcaaaaagttcagcatattagaatcaccgggaggccttgttaaaagagttcgctgggcccatcttcagagtctctgagttgttggtctggaatagagccaaacgttttgtgtgtctaacaattcccaggtgctgttgctgctgctactattccaggaacacactttgagaaccattgttattgctctgcacgcccacccactctcaactcccacgaaaaaaatcaacttccagagctaagatttcggtggaagtcctggttccatatctggtgcaagatctcccctcacgaatcagttgagtcaacattctagctcaacaacatcacacgattaacattaacgaaaattattcatttgggaaactatcagccagttttcacttctgaaggggcaggagagtgttatgagaaatcacggcagttttcagcagggtccagattcagattaaataactattttctgtcatttctgtgaccaaccacatacaaacagactcatctgtgcactctccccctcccccttcaggtatatgttttctgagtaaagttgaaaagaatctcagaccagaaaatatagatatatatttaaatcttacttgagtagaactgattacgacttttgggtgttgaggggtctataagatcaaaacttttccatgataatactaagatgttatcgaccatttatctgtccttctctcaaaagtgtatggtggaattttccagaagctatgtgatacgtgatgatgtcatcactctgctgttaacatataataaatttattgctattgtttataaaagaataaatgatattttttaaaaagtcttggtttttattataaatatgataaatattgctagctataatctacataaccaaaaacctttatagttttttggtgctttttttttgtttttttgttttttttttttttgagatggagtgttgctccgttgcccaggctggagtgcagtgcacaatctcggctcactgcagcttctgcctgctgggttcaagtgattctcttgcctcagcctcccaagtagctgggactacaggcacccaccaccaagtccagctaatttttgtatttttagcagagacggggtttcaccatgttggccaggctggtctcgaactcctcacctcaagtgatccacccaactcagcctcccaaagtggtgggattacaggcgtgagccacggcacccagcctggtatcctctatagtttttaatagttttaaataacatgcaaagatcctgtgaaatggccaacaagcacatcaacatcactggtcatttcagaaatgcgaatcaaaaccacaatgagatactacttcatacccattaagatgactttaagaaaaagaataggaatgctcacagatggctggtaggaatgtcaaaatgtgcagccactgtgcaaaacagagtctgttttggcagttcctcaaaaagctaaacataaatttgtcctataacccagcaattgtattcctaggtacacacccaagaaagacaaaaacgtgtctaaatacaaacttgtacacgactctttataacagcattattcatactcaccaagaggtagaaacacccaaatacccaacaacaaagggatggataaaggccgggcatggtggctcatgcctgtaatcccagcactttgggatgccaaggtgggcagatcatttgaggccaggagttggagaccagcctggccaacatggtgaaacctcatctccactgtctctactaaaaatacaaaaaattagctggtcatagtggcgcgcatctataatcccagctgcgtgggaggctgaggcacgagaatcccttgaacctgggaggcagaggttgcagtgagccaagatggtgccactgcactccagcctgggcgacagagggactcttctctccaaaaaaaaaaaaaaaaaagaattgataagcaaatcatggcatatccctgccagtggagtattagccacaggaagggatgaagtattgatccatgctgccatttagatgaacctcaaaaacattatgctgagtgaaggaagccagacacaaaagatcactactgtatgactcatttaacatgaaatatctagaataggcaattccatggagacagaaagcagataagtgtttgccaggggatttttctggggtggtaaaaaagttttgaaactagagggaggaggtagttgcacaacatgttgaatacacgaacagccactggattgtatactttatcatggttaattgtgtgttatgtgaatttcgcctcaactttttaaaaaggagatcctgaggccaaaatatttaaatattgcttatcttattcttgatgctcaaagaagggtcatcagcccagaaggatcctcctgaagtctttatggtgactttagtattctactaagtgagttatcaggggaccctgaatttttgttttcaaaaaccaaaattagcatattactaaagtttatggaagactccactttggtattctatcgagaacgtaaaatttgcatagctcccaggaaggctgctgttcctgatgcatcaccagaactatcgtgagttggtttcagtttttactcgctggtattccttcagctaaatgatgaattcctgccagtgattttcatggaggggttgtgttggctggctcccaacgtgcataatcaattaatttgctgtgggttgaaaatctgaacaaactgaaagtcaataactcttcttaggtctgtagaagtaagtaagattacagggtagctcactgtccccaatattggagaggcagacaggctgatacagggaaatcataacctcctggaccagaaacccaggaacaaaccctgctactggaaccagcagaggggcaggaaaacctaaactggaactgacaaattgctggaggctcagtgtggacacttctgagagataaaaatttcaggggagcaacccagtcacagggggtccccactttcatgacctttccctccaggaactcaatgaggtcttcacagtgaagatgggagaaaaacttccttgtgcttttgacgggggaaagagaaaaggtactgtcacacgcatccgtgtgaagagagtccaccaacaggctttgtgtgagcaacaaggctgtttatttcacctaggtgcgggcgggctgagtccgaaaaaggattcagcaaagggtggtgggattatcattagttcttatagatttgggataggcatacaaagtacattcacaagggtggggagaatattacaaagtaccttcttaaggtcaggggagaacatatcgtatcagttagggtggggcaggaacaaatcacaatggtggaatgtcatcagttaaggctattttcacttcttttgtggatcttcagttgcttcaggccatctggatgtatacgtgcaggtcacaggggatatgatggcttaacttgggctcagaggcctgacaggtaccattctgaaatatgccagagcattcagtacttgtccaacaaggcctgccctcaagaaacagtattttcctcactatcttaaattttaccatagtctaaccaacctaaattttaccagtgtctaaccaacctgaaagaagggaaataaccagctctagcctctctgcccttcttgtctcatctaagggaggaggcgaatgaaaagcacttgtgaaggtcacagcccaggggtacaggcttgctgaaggctgaacctaatcataagactatggaatggttcccctccccctgcaccttaccaccacatcagtggggctgttgtgcgctcacaggggactacagtggaaacaactgcacatttcagtccctctttaagaagcagtctctagggaagcccaaagatgagaggggagacaaaaacaaagacactagagggaattttagcctctgacatctacagctacagcaaatagcaaacacagcctaactcctaaccagataaacataaaggctcacactaaaggcctatttaccttggttccttttatgctgtatatcaggtccagctttcaacaaaaaattacaaggcatgctaaatggcaaaaaaacacagattaaagaggcaaagcaagcattgtaaccagactcggatactaccatgttggaattatcagactgggaatttaaaacaactacacaaataagccattatgacagagatttctatggtcctgtagatccattcttcccttccaccatcagtaataaaatccccaaattttaacccaacacatttctgcccctagctaaagacaacactttctagcctcccttgcagctaagtgtggtcatgtgactaaatttggatgagatgtaaaccaaaaagtatctgagacaggtctaaatccattcagaggtttatattgccaagattaaagaccatgacctgtgatacagcatcaggagttcctgagaacatgtgaccaaggtggttgagttacagctgggtttgatattaatgcattttaaggagacagaaattataggcgaagacataaagcaatacatgtaaggtatacattggttcagcctagagaggtgggacatgtcaaagtgggaggcttccaggtcatagttgattcaaaagttttccgattggcaattggttgaaagagttaagctatgcctgaggagttgaagtcagtaaaaagaaatgcttgagttaagataaggggagtggggttgtggaagacactgtccttgtcatgtacacgaagcttccagatagcaggcttcagagagaatagagagcacatatatcttattggaacttaacagacgtcagactctctggaaaagacccattaagagaagggagattcctccagtatgaaaattaagagacagctttgcagggccacttcaaaatatgtcaaaaaatattttggggtaaaataattttatttccttcttggcctgttatatgtcatgtgatgctataccagaatcaagctgggattgggtatcttgttgctaaagcatctgtttcttaggtcttatgatctctattttaatgtaatcctggtcagttgatgcctgaattccaaaggaagggattacaatgaggcgtgtcaacccccccacttcttgtcatgacctgaactagtttttcagtttcttggggatgcccttggccaaaaaggggctcatttagtcagttgggggcttagaattttatgtttggtttacagagatatgagcagaagggacgtgtgtgacgcccagggtgtgcccttgaagagaatgtgcacaccctccttcatctcctctcactggtggctgcgtgctcttgctctcgtgagctagaaccaccgggaggatagaagccacacatgaagcctgagagggaaaaaaaaatccaaggaggctgggagtctgaccccatgaggtgccccagcagcagtgcacacactcggactgcatatgagacagaaataaccctcccatttgctgcgatttttgcccttgttagggcagcatcctaactgtatcaatcacccacactcctactaaaatgacaccctcggctatcgtttggatatggttttgttaccacaaaggggtcctgctccagaccacaagagagggttcttggatctcatgcaaaaaagaattcaggacgagtctgtaaagtaaagtgaaacaagtttattaggaaagtaaagggataaaagaatggctactccatagacagagcagttccgagggctgctggttacctatttttatggttattccttgatgatacgctaaacaaggggtggattattcatgcctccccttttgagaccatatagggtaacttcccgatgttgccatggcatttgtaaactgtcatggcagcggtgggagtgtagcagtgaggacaaccagaggtcactcttgtctctattttggttttggtgggttttagccggcttctttactgcaacctgttttatcagcaaggtctttatgacctgtatcttgtgccaaactcctgtctcatcttgtgacttagaatgccttaaccatgtgggaatgcagcccagtaggtctcagccttagtctatccagcccctattcaagatggagttgctctggttcaaacacctctaacagttgtttatcccaagcaaatctcatgttggactgtgattcccagtgttggaggtagacctaataagaggtgtttgtgtcatgagggtggatccttcatgaatagatgattgccctccctgggtgaggggggtgagtgagtgctcattctattcattcccgtgagagctggttgttaaaaagagcctggcatctccccccaccctttcttcctctctcaccatgtgacctctgcacacaacagccccccttcacctcccaccaggagcagaagcagcctaagacctttcccagtgtagatgcccaatcttgaactttccagacaccagaactgtgaggcaaataaaactttttctttataaatgattcagtctccagcggggcatggtggcgcacacctgtaatcccagctactcggaggctgaggcaggagaatcacttgaacccaggagttggaggttgcagtgagcagagatcgcgccactgcactccatcctggccacagagcgagactctgtcaaaaaaaaaaaaaaagagagagagagagggagagagagagaaaggaaggaaggaaggaaggaaggaaggaaggaaggaaggaaggaaggaaaaaagcaaagaaagaaagaaagaaaggaaagaaagaaagcaaagaaagaaacaaagaaagaaaaagaaagaaagaaagaaagaaaaggaaggaaggaagaaagaaagaaagaaagaaagaaagaaagaaagaaagaaagaaagaaagaaagaccagtctcaggtattctcaggttacagcaacacaaaacagactaagacaccctctccaccaaaattctgtttgtatagcatattagtatcaaaatcttttcaatggaaaatggactccagaatcaatattcaacatgacagcagagtttcaagtaaatacatgttttctgttccataaatattatctgaaaaagatttccctacaggagataaacaagtagataagataaaataacattggttctctttattaatttgaatactcccctacttttcttcagaaaatcactgcattcattctccaacacccctgaagcctttctgaaatgttggctcacatggagatgttccttttgcctgatgtcttctggctaagtcagaaactgcaaagggaaacctgctgaagttttaaaaacttttccctgttatttccgtttctcctcttaaagagtgcagtgcgaaacacgtgtcctcttcttctacgatgttgatgaacataccttcagagctagcctattgatatgaaggtaaggatgaaaagaaatctgttatctcagggcagtaggattatcaagcaccatatcagcaaatgcatcactcgaaactaaattgtaaatatagccatgcaccgcataacaatgttttcatcaacaacagactgcatatacacgacagtggttccataagattataataccatatttttaccataccttttccatgtttagacacacaaatacggccaggcgcagtggttcacatctgcaatcccagcactttgggaggccaaggcgggtggatcatctgcggtcagaagttccacaccagcctgaccaacatggtgaaaccccgactctactaaaaatacaaagttagccaggtgtggtggcgcatgcttgtaatcccatctacttgagaggctgaggcaggagaatcgctcgaacctgggaagcggaggttgcagtgagccaagattacaccgttgcactccagcctgggcaacagagtgagactctctctcaaacaaacaaacaaacaaacaaaaagatacacaaatatataccttagtatcacaattgcctgcagtattcagtatagtaacctgctttacaggtttgtagctagggacgacaggctatagcagccccagagtgcagtaggctctaccatctaggtttgtgtaagttcactctgcgacgtttgcacaaaaacaaaatcacctaacaatgcatttctcagaaagtatccccatcattaagtgactcgtgactgtaatagaaaatgaaaacccactgtctctcataactgtgtaccctccagtggtgcttcctgcatggctcagcaaccttatcaagaacctggttatgggtattttttcttctctcttttctgtctccaatgatgtcaaatttattcaaagaccagcttagcctcgtgatagccaacaggttgtagctattccagaattaatatcagattatcacatctagaaataagaaaagacataaggttccctcgttggagcttccagcaaatgtcttctccagtcttgttgactcaaactaggtctcatatctactcctgcactgtgaccagaagatgtgagatgattctgatttcgtaaggcccaagccacagacctcactcctagaaccagtaataaagagaagatcttaaaagcagccagagaaaaacgaacctttgcagagaaatataaataaggacgacagccagacccgatggctcatgcctataatcccagcactttgggaggtcgaggcaggtggatcactcgaggtcaggagttgagactagcctggccaacatggtgaaatcttgtctttactaaaaatacaaaaattagccaggcatggtggcacatccctgtaatcccaactactcagcagactgaggcaggagaatcacttgaacccaagaggtggaggttgcagtgagccaagatcgcaccactgcactccagcctgggtggcagagtgagattctgtctcaaaataaataaataaatgcagatttctctctggtaacagtataagtggagcaatatctttaaactactgaaagaaaaaactgtcaacctaaagttctatatgcagggaaaatagccttcaaaaatgaagatgaaataagtatttttagacatataaaagttgaaagacttcataaccagcaggcttacatgccaataaatattaaaggactcggctaaaatttcactgggttgaataatgtctccccagaattcatgcctacttggaaccgacaaatgtggccttgtttgaaaatagaatctttggaaatgtaacaagttaagatgaagtcataccagattagggtggaccttaaacccaatatgactggtgttctcataagaagagggaaatctggacgcagacccacacagagggaagacagccaggtgaagacagagtcagagattggaggattttttttttttttgagacagagtctcactctgtcacttaggctggagtacggtggcaccatctctgctcactgcagcctctgcctcccgggctgaagagattctcatgcctcagccgcccaagttgctgagattagacgtgtatgccacgacacctggctaatttttgtatttttttgagtagagaccgggttttgccatatttctcaggctggtttcagactcccggtctcaagtaatccacttgccttggcctcccaaagtgctgggttagagaagtgagccactgcgccccgctggagaggttggagcttgatgccacgagctgaggaacaccaaggattgtcagcaataatcaggttatacactgtttgactccatttatataaatttctagaaaatcccaactgccctatagtgacagaaagcagatcaaacactgtcaggggaagatgacaaaggaacattatcttgattgtggttttaggggtgtgtactcatgccaaaacttaccaaactgtgtacttcgaatatgtgcagtttttcaatgttcactaaacccccaataaaactctttctcaaaaaattacctgtttgaaattcct

SEQ ID NO: 61 - DNA, 586 bp, Homo sapiens
ctcctgactccgatagagactggatggacccacaagggtgacagcccaggcggaccgatcttcccatcccacatcctccggcgcgatgccaaaaagaggctgacggcaactgggccttctgcagagaaagacctccgcttcactgccccggctggtcccaagggtcaggaagatggattcatacctgctgatgtggggactgctcacgttcatcatggtgcctggctgccaggcagagctctgtgacgatgacccgccagagatcccacacgccacattcaaagccatggcctacaaggaaggaaccatgttgaactgtgaatgcaagagaggtttccgcagaataaaaagcgggtcactctatatgctctgtacaggaaactctagccactcgtcctgggacaaccaatgtcaatgcacaagctctgccactcggaacacaacgaaacaagtgacacctcaacctgaagaacagaaagaaaggaaaaccacagaaatgcaaagtccaatgcagccagtggaccaagcgagccttccagattttcaaatacagacagaaatggctgcaaccatggagacgtccata

SEQ ID NO: 62 - protein, 136 aa, Homo sapiens
MDSYLLMWGLLTFIMVPGCQAELCDDDPPEIPHATFKAMAYKEGTMLNCECKRGFRRIKSGSLYMLCTGNSSHSSWDNQCQCTSSATRNTTKQVTPQPEEQKERKTTEMQSPMQPVDQASLPDFQIQTEMAATMSI

SEQ ID NO: 63 - DNA, 2104 bp, Homo sapiens
ctcctgactccgatagagactggatggacccacaagggtgacagcccaggcggaccgatcttcccatcccacatcctccggcgcgatgccaaaaagaggctgacggcaactgggccttctgcagagaaagacctccgcttcactgccccggctggtcccaagggtcaggaagatggattcatacctgctgatgtggggactgctcacgttcatcatggtgcctggctgccaggcagagctctgtgacgatgacccgccagagatcccacacgccacattcaaagccatggcctacaaggaaggaaccatgttgaactgtgaatgcaagagaggtttccgcagaataaaaagcgggtcactctatatgctctgtacaggaaactctagccactcgtcctgggacaaccaatgtcaatgcacaagctctgccactcggaacacaacgaaacaagtgacacctcaacctgaagaacagaaagaaaggaaaaccacagaaatgcaaagtccaatgcagccagtggaccaagcgagccttccaggtgaagagaagcctcaggcaagccccgaaggccgtcctgagagtgagacttcctgcctcgtcacaacaacagattttcaaatacagacagaaatggctgcaaccatggagacgtccatatttacaacagagtaccaggtagcagtggccggctgtgttttcctgctgatcagcgtcctcctcctgagtgggctcacctggcagcggagacagaggaagagtagaagaacaatctagaaaaccaaaagaacaagaatttcttggtaagaagccgggaacagacaacagaagtcatgaagcccaagtgaaatcaaaggtgctaaatggtcgcccaggagacatccgttgtgcttgcctgcgttttggaagctctgaagtcacatcacaggacacggggcagtggcaaccttgtctctatgccagctcagtcccatcagagagcgagcgctacccacttctaaatagcaatttcgccgttgaagaggaagggcaaaaccactagaactctccatcttattttcatgtatatgtgttcattaaagcatgaatggtatggaactctctccaccctatatgtagtataaagaaaagtaggtttacattcatctcattccaacttcccagttcaggagtcccaaggaaagccccagcactaacgtaaatacacaacacacacactctaccctatacaactggacattgtctgcgtggttcctttctcagccgcttctgactgctgattctcccgttcacgttgcctaataaacatccttcaagaactctgggctgctacccagaaatcattttacccttggctcaatcctctaagctaacccccttctactgagccttcagtcttgaatttctaaaaaacagaggccatggcagaataatctttgggtaacttcaaaacagggcagccaaacccatgaggcaatgtcaggaacagaaggatgaatgaggtcccaggcagagaatcatacttagcaaagttttacctgtgcgttactaattggcctctttaagagttagtttctttgggattgctatgaatgataccctgaatttggcctgcactaatttgatgtttacaggtggacacacaaggtgcaaatcaatgcgtacgtttcctgagaagtgtctaaaaacaccaaaaagggatccgtacattcaatgtttatgcaaggaaggaaagaaagaaggaagtgaagagggagaagggatggaggtcacactggtagaacgtaaccacggaaaagagcgcatcaggcctggcacggtggctcaggcctataaccccagctccctaggagaccaaggcgggagcatctcttgaggccaggagtttgagaccagcctgggcagcatagcaagacacatccctacaaaaaattagaaattggctggatgtggtggcatacgcctgtagtcctagccactcaggaggctgaggcaggaggattgcttgagcccaggagttcgaggctgcagtcagtcatgatggcaccactgcactccagcctgggcaacagagcaagatcctgtctttaaggaaaaaaagacaag

SEQ ID NO: 64 - protein, 196 aa, Homo sapiens
MDSYLLMWGLLTFIMVPGCQAELCDDDPPEIPHATFKAMAYKEGTMLNCECKRGFRRIKSGSLYMLCTGNSSHSSWDNQCQCTSSATRNTTKQVTPQPEEQKERKTTEMQSPMQPVDQASLPGEEKPQDEGRPESETSCLVTTTDFQIQTEMAATMSIFTTEYQVAVAGCVFLLISVLLLSGLTWQRRQRKSRRTI

SEQ ID NO: 65 - DNA, 2320 bp, Homo sapiens
ctcctgactccgatagagactggatggacccacaagggtgacagcccaggcggaccgatcttcccatcccacatcctccggcgcgatgccaaaaagaggctgacggcaactgggccttctgcagagaaagacctccgcttcactgccccggctggtcccaagggtcaggaagatggattcatacctgctgatgtggggactgctcacgttcatcatggtgcctggctgccaggcagagctctgtgacgatgacccgccagagatcccacacgccacattcaaagccatggcctacaaggaaggaaccatgttgaactgtgaatgcaagagaggtttccgcagaataaaaagcgggtcactctatatgctctgtacaggaaactctagccactcgtcctgggacaaccaatgtcaatgcacaagctctgccactcggaacacaacgaaacaagtgacacctcaacctgaagaacagaaagaaaggaaaaccacagaaatgcaaagtccaatgcagccagtggaccaagcgagccttccaggtcactgcagggaacctccaccatgggaaaatgaagccacagagagaatttatcatttcgtggtggggcagatggtttattatcagtgcgtccagggatacagggctctacacagaggtcctgctgagagcgtctgcaaaatgacccacgggaagacaaggtggacccagccccagctcatatgcacaggtgaaatggagaccagtcagtttccaggtgaagagaagcctcaggcaagccccgaaggccgtcctgagagtgagacttcctgcctcgtcacaacaacagattttcaaatacagacagaaatggctgcaaccatggagacgtccatatttacaacagagtaccaggtagcagtggccggctgtgttttcctgctgatcagcgtcctcctcctgagtgggctcacctggcagcggagacagaggaagagtagaagaacaatctagaaaaccaaaagaacaagaatttcttggtaagaagccgggaacagacaacagaagtcatgaagcccaagtgaaatcaaaggtgctaaatggtcgcccaggagacatccgttgtgcttgcctgcgttttggaagctctgaagtcacatcacaggacacggggcagtggcaaccttgtctctatgccagctcagtcccatcagagagcgagcgctacccacttctaaatagcaatttcgccgttgaagaggaagggcaaaaccactagaactctccatcttattttcatgtatatgtgttcattaaagcatgaatggtatggaactctctccaccctatatgtagtataaagaaaagtaggtttacattcatctcattccaacttcccagttcaggagtcccaaggaaagccccagcactaacgtaaatacacaacacacacactctaccctatacaactggacattgtctgcgtggttcctttctcagccgcttctgactgctgattctcccgttcacgttgcctaataaacatccttcaagaactctgggctgctacccagaaatcattttacccttggctcaatcctctaagctaacccccttctactgagccttcagtcttgaatttctaaaaaacagaggccatggcagaataatctttgggtaacttcaaaacagggcagccaaacccatgaggcaatgtcaggaacagaaggatgaatgaggtcccaggcagagaatcatacttagcaaagttttacctgtgcgttactaattggcctctttaagagttagtttctttgggattgctatgaatgataccctgaatttggcctgcactaatttgatgtttacaggtggacacacaaggtgcaaatcaatgcgtacgtttcctgagaagtgtctaaaaacaccaaaaagggatccgtacattcaatgtttatgcaaggaaggaaagaaagaaggaagtgaagagggagaagggatggaggtcacactggtagaacgtaaccacggaaaagagcgcatcaggcctggcacggtggctcaggcctataaccccagctccctaggagaccaaggcgggagcatctcttgaggccaggagtttgagaccagcctgggcagcatagcaagacacatccctacaaaaaattagaaattggctggatgtggtggcatacgcctgtagtcctagccactcaggaggctgaggcaggaggattgcttgagcccaggagttcgaggctgcagtcagtcatgatggcaccactgcactccagcctgggcaacagagcaagatcctgtctttaaggaaaaaaagacaag

SEQ ID NO: 66 - protein, 266 aa, Homo sapiens
MDSYLLMWGLLTFIMVPGCQAELCDDDPPEIPHATFKAMAYKEGTMLNCECKRGFRRIKSGSLYMLCTGNSSHSSWDNQCQCTSSATRNTTKQVTPQPEEQKERKTTEMQSPMQPVDQASLPGHCREPPPWENEATERIYHFVVGQMVYYQCVQGYRALHRGPAESVCKMTHGKTRWTQPQLICTGEMSQFPGEEKPQDEGRPESETSCLVTTTDFQIQTEMAATMSIFTTEYQVAVAGCVFLLISVLLLSGLTWQRRQRKSRRTI

SEQ ID NO: 67 - DNA, 92099 bp, Mus musculus
  misc_feature (1)...(92099): n = A,T,C or G
ctggacctgtaagccagcaccagtttaaaatgttgcccttgataagagtttcctgggtcctggtgtctcttcgccgccataaaaaccctcagaagtgaactcagtttcctagatttgatagtctggggcttggcacactgaaccaccccagcagccatctcacaagatgctctattccagcaaccccctccctttccacctttttttttttttctgacagtctgaagtttttatctagtgggtcttcgcgtctagaagaaggtgttgggcctcttagtggtgaagtgtgaattgtgttggtgccataacacgtggtggggcaatgggaatttgatcttagaggcatggaactgcacttgccagctgcactctcttccaccttcatggtctggatgcagtgtgtggggcgcccatgtcccggtagcactgtgtgaccacgccagcggtggtcaggtcctgataccctaggtacccgttgtgtgtgccactgtgggagtcgtagtgcaaccagaagccaaagttcttcacacacaggggtgacttctcaaacacctgcctgcagtacacagtctcccctgatgacttcttcgtcttcttcagctgtaccacaacgtaccagaagcagaacttggccacggcggtgtgtggcattttggggttggcaagcagcgtcccatcactttgtactcctgaagtgtgcctcactgccactcacaaaaagttcctgctctatcttgatgtttcttctgttactttttttttttccttaagacaggttttctctgtgtaaccctgactattctggatggaactcactctgtaggccaggctggccttgaactcacagaagttgacctacctctgcctccccggtgctgggattaaaggcttgcgccaccacctgactcctccctttatatttctacgagtatttttacttttttatatttttatattgtttttatttccctatacatactcatctaactttgaccacacatgtctttattctttttttttttttttttttaggatgcaaaaagtattttatttttaaacttctaaagtttgaacacaaaatagcctagtttagacgagtttccaagctgagtgcacttgcatggagctcagtttctggctgatgaacagttcctaacaccctatgtgggtgcctacgttctcatctgtgggtggtgagccgtccagcgtccgctggtaacatcccttttttgccttggtaagggcttaacaaccattggcgttgttggagtcttacacagccattgctgtcccgaatgtctcctgcgaggcataaaccatgtacaggaagccgtcttcatctctctcgctctcgtacacttcggagatgggagtggacacactcaccatgctgtgcccattcaccaggaggaagaaggcttggttagcattgagctgcaagcgccgtctgattatcttgatgagctcgctcatgttcacgtgatcaggcaccaggaacttggtcttgtccaggaccggcagctgcttctcccacttgtatcgctctataatccctgggatctcggtggggtgctgctcccggatgagccggacatcttccactctttgtacaaagctccggcgctgcttgaaggtcttcttggacggcatggcgcgtggggatcccgacgatctgactccagcgacgatcacacttcccttgtgtgtgtctcagcccgcagccgagtcaggtgactcgcggcgcgtcaccgagggtggggccgagggcggcctcgagagcggccatgacaggggtggcggaagctccacacgtctttattcttagacagtcttttcgtaaatgtatttttgtgtgtatattttgctcccgtgtatatatttatgtgcaccgtgtgcatacagaacctgaaagaggtgttgggttccccaggactagagttacaggtcattgtgagctgtagtaggggtcctgggaatcacaccgatcctaggcaagtgctcctaaccactgagccatatctccaccccatgggcaatttctttccttttttgtccccataacttcccattttctctttctactcccttagtaatattttcacatttcacttcatctgactagttttgttttgctttagaaccaaagagatgagatttaaaattaatactcagctcagtttttagagacttttaagaacgtttagaacaaagccaggcgtggtggcgcacgcctttaatcccagcacttgggagggcagaggcaggtggatttctgagttcgaggccagcctggtctacatagtgagttccaggacatccagggctannnnnnnnnnnnnnnnnnnnnnnnnnnnnnnnnnnnnnnnnnnnnnnnnnnnnnnnnnnnnnnnnnnnnnnnnnnnnnnnnnnnnnnnnnnnnnnnnnnnnnnnnnnnnnnnnnnnnnnnnnnnnnnnnnnnnnnnnnnnncaaaaaactaagggggaaaaaaaaaagaaaagaaaaaaaagaaaaagaatgtttggaacaatttggctacaaatatttactttttctagtgttcttgagacagttttaccatttaccctaggctggtctgaaactgattatgtagaccaggctggcctctaactcagaaattcacctatctgtctctgccactggactgctaggattaaaggtgtgaatcatcacatccaaccccaaacatctactttttcaactctttttatgaaatgcaaatgggcttcaaatattcacagtaaaaaaaaaaaaatgtagcgggctggagcgatggcccagcggttaagaacactggctgctcttccaagggtcatgagttcaattcccagcaaccacatggtggttcacaaccatctgtaattggatctaatgccctcttctggtgtatctgaagacagcaacagtgtactcatataaacataaaatgaatattaaaaaaaaaatgaggcatccagactgaaatgttagatttctacaaaacaaaaaaacaaacaaaaaaaaaaaaagaaacaaacaaaccataaatcatattcaaaaagggaaagattttatttggctcacggtttcagatgtttcactctgtggttgcttagtaacaccttaggacagccaggaagtaaaaagagtcagaagggactggctcccaatattgccttccacatgacattagcccaagagtctctgcctgctagctgacacatccttgtgtgataccatcctcagaatacaggctggtactaaagattcactcctaacacagaagacaaggcaaaagcactggggtgttattgccaaggtgacaaaagacacacactctgccccaatgctcttctacagcctgtaaacttcccccatggaaacatctggacttgatggtacacacatttgaaattaggtgatcctgaaggtcaaacttaaaatagctgcagtctgagttttgaaggtggtctgcaggagaccctgagtcttaagactttgacacatagaaagcaggagattaaaaaaaaaaaaaaaaggttgtttcaggttactaacgtttaaggtaatctgctaagcagcactccatagcttgtgtcatcaatctatatactcacaaattaaggaagacacgtatggagctttagccaaaactggaaaccattatagtctatgaagggagggagggaacagggaatggtggccaatgcctataattccagcattcaagagtctgaggcaggagggttgctgcaagttcaaagtcagcttgggctatgtagcaaaaccttgtctcaaaacaaaactcaaaacacccattgcagtttggctcacgtgctacagaggcctggtccccaggtaatggtgctattgggaggtggcagggcctttagaaggtagaagaaagtcactgggcattgattgaagcagagaaagtcttcagtgaacagaatggttttttgatgtcagtcataaattcagcgatgtgatctggtgtgtcatatacactatgcatattacatgatctatgtattaagggttaatatataaaatattaaatatagtatcataaatgtttacatgcatatacatatataatttctgaatgaaattgttatgtttgctataaatgctacaattgttaggatcagggaggaggaggagctaagagcaatggtggaaaaaaaaacagccctctgaagctcactgcagcctggttttgttcagaggtggcaagtcgctgctcaacagtggaatctttgccatgtatggacaatggttgtaagtattctttctttctttcccatgacttgaaatgtgtgctgcctcagtttctcccaattcccctttcaaatcaaagtgccctgtgaaatcaatctgccttgcttcacttaccttacttcctctctcactgtgagtctgactcctccgatgagtcccatggggcatcccaaagtagtcaccctctgtcaaatcacattctcccctctccttcctgtaaacatctcccggagttcaccttccaggctaatcacacagatctaatgaaacttgaattaagatacaggcagtgcacaggtcatctcagagaggacgctcgccaggcccagggtggaaatggatgggccgatgtgatgcaggagcggtctacagcaagggcagctgagttctttgagggtagagggtggggacggtgtactgtacagcatcatgataggatctggagcagacaggtgctgagaaatggagccagtagatggggtagcaacatgccaagtcaggaaaggaaaagatgtataaaaggagtttaaaggggaggtttgaccataaagttatatcatgtcccagattttaaataataataataatgatgatgataataatagtaataataatactaatctaacatacaaactggagaggtggcctcatggttacaagggagaatttctcttgcaatagacctgaatctggttcccagactacctgtaactctgtctccatgggacccagtgccctcttatggtctcctcagaaactggcactcatatgggtacatacctatatacctgcacacacacatgcacataaacacacgcacacacacacatgcacacacacacacacacacgcacacacacagacgcacatgcacacacacacacacacacacgcgtgcgcgcgcacacacacacacgcacacgcacacacacacacacacacgcacacgcacatgcgcacacacacacacacacacacacgcacatgcacacacacacacacgcacacacacacacacacgcgcacacacacacacacacgcacacacacacacacacacgcgcgcgcacacacacacacacgcacatgcacacacacttaaaaataagacctttaagaaatacatagcgcttggaacttgcctcagcagcacatatactaaagtcacatctgtacaggaagattagcactgcccgtgtacaatcacagtgtgaaaaatcccaagatgtgtttctttgcaaggagctgtgtgtgtgtgtgttcccacgagtgcaggtacgtttaggcgtgtaggtgcatgagctgctgtgttgaggccagaggtcagcgtcgagtgtcgctcctcaggtgccatccaccttttgctgttgttgttgttatgggggattttgtttggttttaaaaaaatatttatatttatgtatatgtgtctatctgtctccctctctttctgtgtgtgtgtgtatgtgtgtttatgtacatacatgtgtgatggtgcctggtgccagtggaggccagaagtggatcagatcccctagatgtggctctgggaaccacgcttctctgtctgtcatctgtctgtctcagtcaggattactattgctgtgatgaaacactgtgaccaaagcaacctaggcaggaaagggttcagtctcccaccattcatcatcagaagcagtgagtgcaggaactcaagcagggcaggaacctggaggcaggagctgatgcaaaggccatggagggatgctgcttactggcttgctccccatggcttgctcagcctgctctcttatagaacccaagactaccagcccagggatggcaccacccacaaggggctgagcctttccacattgatcactaattaagaaaatgccctacagccagatcttatggaaacattttcttcaatagaggcttcttcctctctgatgattctagtttgtggtcaagttgacacacaaaactagctggcactctgtctatctgtctgtctgtctattaaaatatgatcaaatgtaacccaacctagctttcagcttgctgtgtagctgagagtgacctggaatttctgatccccttgcttctgcctcctaggtgctggtacaagcatataccaccaccctggtacaagcatataccaccaccctggtacaagcgtataccaccaccctggtacaagcgtataccaccaccctggtacaagcgtataccaccaccctggtacaagcgtataccaccaccctggtacaagcgtataccaccaccctggtacaagcgtataccaccaccctggtacaagcgtataccaccaccctggtacaagcgtataccaccaccctggtacaagcgtatatataccaccaccctggtacaagcgtataccaccaccctggtacaagcgtataccaccaccctggtacaagcgtatatataccaccaccctggtacaagcgtataccaccaccctggtacaagcgtataccaccaccctggtacaagcgtataccaccaccctggtacaagcgtataccaccaccctggtacaagcgtataccaccaccctggtacaagcgtataccaccaccctggtacaagcgtataccaccaccctggtacaagcgtataccaccaccctggtacaagcatataccaccaccccctgtttgtgtggttctgggcttaataagcccagctttaccaattgaattatatccccagcccagtattctttttttttcttccattctgtggattacctttatttttttattttactttctttttaaaaagcatttatttggtgtgtgtgtgtatgtgtgtgtgtgtgtatgtgtggtacacatatagagtgcatacataggtgtatatggatatatactcccgtgcctctcactgagcccagggctaggatggtgaccatcaagccccagcaaccctactgtctctatacctcctgtccctatacagcattgagggtataaacactcttgcacactatcgccttgcctgactttacatgtgggtgctgaggacttgaactcaggtccccaggcttatgcaccaaccactcttaacccactgtgctacttccctatctctcatcttgtttttttgagtcaggatctctcactggcaggggcctcacccaggaggccaggctggcattccatgagggccctgtggggaatcttaatttcagccttctcagctctgggattacaagtattctggctggagagatggctcagcagttaagagcacctactactcttccagaggtcatgagttcaaatcccagcaaccacatgatggctcacaaccatctgtagtggggatccgatgccctctcctggtgtgtctgaagacagcaatattgtactcatatgcataaaataaataaaatcttaaataaacaacaacaacaacaaaacaagtattcaacaccatgcctggtttttttcacattggttccagggactgaatggagacatgccaccccccccccctctttttttttgttttttgtttgtttttcgagacagggtttctctgtgtagctctggctgtcctggaactcactctgtagaccaggctgtccttgaactcagaaatccacctgcctctgactcccaggtgctgggattaaaggcatgtgccaccactgcccagcgacatggctcctttttaaagaacacttactgcttcttggctcaggttaagttccaactgcctataactccagttccaagagatccagtgcccccttctggcctccgagggtagatcccgattcaataacaaatgggagtttgtaacttcgggctttttctcccacaccactttgttccctgtaataacgactctgagggtaattattaatacatacttaggccataagctttggcttgttctccaactagctcataacccaattatctctcttattctatattagttcagctatgtggctgctttccgggcaaatctcctgtggctaactctttcccagaattctctctttttctcccagatgtcccacctcctatttcctgctccagctcattggccactgacttctttattcatagtgatgcttataagagattctatcggagctgggggtgtagctcagtagtaagagtgctctgggttctggggtcctcatggttgtatggcaagctctttactgactcagccatctccctacttccactttcctttttttttttttttttttttggtttttcgagacagggtttctctgcatagctttcgctgtcctggagctcactttgtagaccaggctggccttgaactcagaaatccgcctgcctctgcctccccagtgctgggattaaaggtgtgcgccaccacgcccggcccttttttttaagatagggtcttgctatgtagcccaggctgactaatgctctacctgcctccgcctcatggcattatgggtgtatagcaacaaacccagctctagaaatttttttaagtcaattattgtaattgcaaatgtaccaggactggaagatcttagcgttggtgtcttctctttccattttattaaaggggaaagcctaaaagcaaactaagcaaacaaaaacctggtttgaagaagtgatctcccaagtgaaggctggcctctgagaactgtcctgggatgggctggacctaagctttgtcttctggttccagatgaataaccgataaccacagatacacatctcagcagcctgagcaccacatgtctcggagagtgaactctccacacctggaaggttttgggtctgtgtttctttttctttccctttttctttttcttcttctttttcttttactttttttcttgctgatgatataaccccgggccttgcaagagctaagctagcaatctaccggtgagctacatctctagccccacaaagctatcagatgattaaaaaaaaaaaaagatccatgaataggctggagaggtagctgtgtgggaattgccctccctattaaagatgaaatgtgctgctttacatatgtatatttctccgtctggccgctgatcagtggacagtctcactgtggtgtgcaggaatgttggaatgtttcttcatgctcctgttgcaattccagaagtggaatccatgcgtcgggcacctgaccttaaaatgcctaaagcaccaagcccatgtcattttccacagtggctgcccggaggacgtcactttgaagtttcccctagcgggaaggctgatagtgctgtggactgagtggaggagaaacagtgttgttagtgtgcttgtatgctctcaggggtcatgcctgaagagaaaaacgatgaaaagaatgaggagcggaggactgctgtgatggagcgatattactgacgtcattatggggagagaactaggacacagaggacaaatggctcaggagggttccttcatggggaagccagggctgctatcctgtgctttcaatattcagcttgatgcacgggaaataattgttacctagagacactatgagactaaaagccagaactaggaggtgacaactccaaacatcctttgaggtgcacggtctaatttgtttgggtgtctgtttaacctctctaatttattgaccttgaaaccgcgtctgcttttctgggtcggaggtggatgggaatcttggacatcctataagaaaggacagggagacaaagaaaatcagtccacaatgcagatctaccagatgtggaataaaactcacggggttaccagtgtatggcaccgattcagcgcccatcacgggacatcaaagatccccgcgcatgaagaaggaggtctgtgtgtcaccactcttctcacccttaggagtttaaagcagaggtccggggactcaaccacggagtccaggcaacttccccagccgaaccgcacccagtctcccctgccgcagtcccggtgccaggagcgcaggctggggaccacggcgggcacgtgggatcggctgcagcactgcgccagttcagcccgcctagcagccccggggctcgcgagcggccgcggcctctggagagaggttcctccccctctgctctgcaccagtccgagggaatctgtggtcagtgacgcgcatccttcagcgagccacctgcagcccggggcgcgccgctgggaccgcatcacaggctgggccggcggcctggctaccgcgcgctccggaggccatgcgggcgttggcgcagcgcagcgaccggcggctgctgctgcttggtaaggcccctcaccccctctgcaccccggccgagcgcgcatcactccctcatacccaccgcgcgctcccctcgccgccgcatcactcccctctttcacgtcccccctttcaagcggtgaacttggctttggtttgcccacccctgccctcaccctcctccgcagcgctcctctgcagctcagtccccaggccaccgcgcctgggcttgggcttggatgctccgtcagcctctgagagtcttcttcagcagcgcaggtggcccgagactccctgacccgacctctgggtactatagattctcgagccggtgcgttctcacctctttgagatgtaggctgacagagcaaactaatgggaaaactgcgagcatcctctgctagagcggtcatccctgctaacgacccccacctgtaccaattttcgcttcactcagtggctagttactttggaaatactatgcaaaacagatttataaatttaaaaactagctacccttcccctctccatacttttcttattttaggattaaaccctagtgacactttcaaggactcctaggactactctcccaagttgcctgttcgggtagaagcatagctgtgattgaaaatagtaactaactataggggggaaagtccccattctgcccagttctaatcggtctcgcgtcagctttctgtttgggaagacaagggggttggattgagttggagttggagacagttctagaagtcgggggtgggggtggggggagatcaggccctgccctagttttgcagccttctgaggcactcctggcttggcctcagtctgcccagtggcctatttccccttcatttccaacatttaggattctggcttgaaccttccgtgacaaatagagaaaacattttgcaacattaaatgagcagaaacggtttccaattactttaaaaaaaaagatgataaaattaaaaaatgtaggctataaaggaaaaggatggggagaacgctgtacctttcttaagcgagttgatgcacagggacatctcaaacgcatggcgtggcgtgcttttcttttcaggctctattaatgcaaaatggttagctttggctgtgtatgagattagattagtgactttcccatagcagagatgatttttctaaagggctaaagggttctagggaagtaactcagaatcagagtaggacttgcagccatgctcaaaccgcactgaactccttcgtaggaaatgtcttagtccctctccagattcaaagcgcaacacatgtgcaaaatcttctgtgtccactccccagttgttatatatcagtgtacctacataaccactgtgcgtcaagacatagagtgactcagcttccaagttacccccactcctcaaactcactctatatcacttttgccagttggtgagatttacaaagagcaaatcactgttataccccacccctctccttcagtgctggggctcagactccaggcctcacgtacatgtggctttatttgtgttgggcactgctacttcaaagagaggatttcaatatgacaacaaacgagagactgtctcttccattatggccgaggagttcatagagcagcaggacacagtcttgttgctgacgttgttattggttgccttggctacttttctattgctgtaaagagacactgtgaccaaagcaacttttataaaagaaagactttctcgggggtttgcttacagttttcgagggtgagtccatggctcttctgggggcggggctgacacagacatggtaggcaggctgtgctggagcagtagctgagagctcagatctagacccacaagcatgagacagagaaagctaactgggaatggcttgggcttttgaaacctcaaagtccacccctaatgacatacctactccatcaaggccacacccaatccttcccaattggttttatatctgtggcacaagcattcaaatagatgagcctaaggggaccattcttcctcagaacgggacagtacactccctggcccccacttgctggcttttagccctgtcatcatgcaaagcgcatttaatcctactttgaaagtccccatagatcgcttctcggccttttggctaagatcaagtgaaagtccccatagactctcaacacagtttaaaagttcagagtcccttctgagactcaaggcagtctcttaattgtaattccctgtaaaatcaaaagcccaaaagcaaagtgtgtacttccaacatacaacggtacagaaaatacattttcatttggaatgtgaaaacgagaatgtagtgaagaaatactggatcaaagcaagactgaagggcaaactccaaatcctgtgctctgtctgatgtcaaaagcttagacagctctgcccttccagcctcgctgactgtgacacacttctctttgatgagctggttcttggtctgaagctgtccttggcaggaatcccatagctttggtatccccaacatcctagggtctccaacacagtccagacttcattttcacagcttttagcattggcctctgtgggtctccatgtagggagttccctgacacaggcctggtctcagacgctctccttaactgcgaagggacattccacaaccggtgtactcctatatgcttcataactaaaggtagactctcagcttaagtaagtggggtctcggcctgagggcaggactccctggattccatgtcactttaagcctttctttttttttaagatttatttatttatttatttactatatgtgagtacactgtacactgtacactgtcttcagacactccagaagagggctccagatcttgttacggatggttgtgagccaccatgtggttgctgggaattgaactcacgaccttcagaagagcagtcagtgctcttaaccgctgagccatctctccagcccccactttaagcctttctttaagcttcttaactctctgagcacaagacttggcttcaagtttaaatttcttggtgctctttttcgacccaaactgtacattttttaaatttctttttgccctgcttgtgcccccttttcactgtagatctgcatgagagtgatcacgcagaaccacacaacacggtcactataaggctaccctggaataaactgtgccaaagaaatccgtcccaggcatattcttaggacaagggcaaaaagcagtcacattctttgccaacatatcagaaagatggtctcaagcccagttgctagtatttttcccctgtaaaacttccagagatgggcctccctggtccacattgctcccaacactattgtcttccaagtgcctagtgcattaagctctttttatggtggtcaaagtcccgaagtcctccacaccccactcctagtaccaacctgtcttggttacttttcttttgctagaaagggacaccatgaccaaggccacttatagaaaacaaaaggagtttaatggagcttgcagttccagaggatgagagtctgtgactgtcatggtgggagcatagcaataggcagacagacatggtactggagcagcagtttatatcttgattcacacaaagagagagctaactggaaatggtgtaggcttttgacacccaaaagtctactaccagtgacacacccctccaaggccacaccttctaaccctttccaaacagttctaccaactgcgaccaagcactcaaatatatgggccctttggataccggacctgtgatggcccctgactcttgtgctttagtttttaattcctgcttcatctgagttcacattagctattaatttcttcataggaacttcatatcagcctgtagtaaattttccgagggttaatgggggggggggactcctccatgctattaaagaatgctctacatcttataaatggaatgatacttgtagtaacttttagttatcagttaagatgttttcattggttttgaaagtgcctatctatgaaaataatgaggtcaggagatagtaaggatggggaaggcgtggttgcagagatgacccagtggtaaagagtgcaggctgctcttgcagaggaccagaattcagttcctagtgtccatgtcaggtagctcacaaccattgtaatgtagattcaggggatctgatacctctgagcatatgtacacaccagcacttgcacacacacttaccaatgcacagacacacatacatacaaacacgtaatacaataaaggtcatctttaaagctggagtttgcatttcctaggaaaacttcagatgagaaaagcgaatagaagcacaaatgaggagaaaaattttaatttaatccatgttattgagtgcttatttctgtgtcaagcacagaactgttttggacaatgtaggcaaaaaggcaaaggatggtagtgtctcagcttaggtatggatatccagtcttattctatttaacagatccatagtctttgtctttcccaaggaaagcatttcataaatcttgtgtgtgtgtgtgtgtgtgtgtgtgtgtgtgtgtgtgtgtgtgtgtgtatggtgtggggtttgaaacagacagggtttttctatgtattcctggctgtcctagaacttgttctgtagaccaggctagccttgaactcacagaggttcacctacctctctctctgaagtgctgggattaaaggtgtgcaccatcactgcccagctccttctgtttctctctctctctctctctctctctctctctctctctctctctctctctctctctctgtatgtgtgtgtgtcacagtaagcaggtggaagtcagaggacaacttgtagaagtcagttctgtcccttcactacatgggtcacagggatcaaactcaggtagtcaggtatgtctacatgtatatgtacaatgtgtgtgcagtgtacacagaggccagaagagggcgccaaatcacctagccttggagatacagatgatggtaagccacgatgtgggtgctggaaaccaaaccccagtacactggaagagctcttaaccactgaaccctttctcctgccccaagagattcccttttagttagtttaacttttcagcagctgttttcatataaatatattttacaatgaggaaagagatagagtactaccaacagatattttgattgctaaagacctatagattaaacatagcatgagtttgaatcctcagaacctatttaaaggccaagcttggtgtgtaatatcagggaaacagggatatggggaaggagacaggagaatccttagaaaacatggatcagctaggccagccatgcaacagcaagcaacagcctttcctcagacaaggtggagggtggaaagacctgaggttctcctctgacctccagaagtgcatgctggcctgcacatgcctgcactaacaagtgtgaaccatacatatatccacatcgtgtggatacacaagggtaaaaaaaaaaattaaataaagacagcatgcttcagtgacgcttcaactagaaaagagtaggagtcccaagggcattaccttgtaaaatttcttaactatagacagattgtattatatgcctgtggaaaaagcaatcttcttgcagttgaggtaaaataaatgatgagttgcaaagttgaatacaatcttttgcatgtggggaagaagcagtttggtttagaatagggtgtgtgtgtgtatgtgtgtgtgtgtgtgtgtgtgtgtgtgtgtgtgagagagagagagagagagagagagggagagagagagagagagagagagagagagagagagagagagagaatcttatagccaaggatagcttagcctcttaagtgccaagactgtaaaggtatattttgcagcctggctgggcggctgtttggatttggtctttccactatggctggtcctaaactcctgtagctcaggccatggtacctagcaagaagcagtttactgaatggtgctttgagcaaatgtgttgaggacattttctcaccagggagtgtttgtgctccactgagaacccccaccccgtaccatctcctcagttcagactgggcctctcctgtcttcactctctaatgatactcggaaatcagtgtggcaggagcccctggcaatgaaatatgaattggatgtcagagattgccatcaaaagagagagagagagggaagggagggagggaggggaggnnnnnnnnnnnnnnnnnnnnnnnnnnnnnnnnnnnnnnnnnnnnnnnnnnnnnnnnnnnnnnnnnnnnnnnnnnnnnnnnnnnnnnnnnnnnnnnnnnnnnnnnnnctgtaatatcaggctggcctcaaattcacgggcatccacctccctctttctgcctttgagtgctaggaataaaggcatgtgctaccactcctagctctgggtgaaattttgatttgacaaacaaacaaacaaaaacaaaaatcatggcaaacttttatttgtaaattaaaaaattagcatataaaataaaatattacatttattgttttcctccctccctccctccctccctctcctttcttttcttcaagacagggtttctctatgtatccctagctgtcccagaacttgctacattgatcaggctggcctcaaattctcagagatctgtctgtctttgcctcctaaatgctgggattaaaggcatgcaccaccactgcccgggttctttgggactttttgaggaagggtttttttggcccaagctggccccaaccaactcttcccacctctgcctcctcagtcctgagattacagacatggatgctaccacatccagtcctcaggacttacaaaggggccttacagaaaataggaatataaatttggtttaacgtactgcatagcttagtctacccgacagttactcactcagatcatcttaggactctcaagggtttacctgaggagagtgtttagagtctgaggtgccttgttttttgtcgtttccccccccccccccccgagacagagtctcaccaacaagatcggcctggttgagttcttcctacctccaagtgttggggtcaccacccctgcaaactttgttgggctttctccctcactgtggcttctaaggaagcttaagctgtggctacaaggtcaaaaggttttcttcctttaagagacggggtctctcgtgagccctgtgcctgggtggtttggctagtttctgcagcgactgtctcctccgtggtatggaaataacgacgaaagttgttgtacaagtcacggacggttgttaagttggctcatagcattttgttctttagataccaacacatgtgaaggaaatataaaaataatgtaaagtacacacacaatgttcttttgcggctagagggattgcataagatcctaaaagaggaactattggtatttcggggggattgtttaaacagtaaaatgcatgtgtgtgtgtgtgtgtgtgtgtgtgtgtgtgtgtgtgtgtgtgttttcactactgtcattattatgttgattgggagccaagaatccgctatagtctacactggagcaggatcttgtcatttttttctctcaaatactgggttttaattataaggtacacactaaattctgtcttcaaaatctgtgattgccgggcagtggtagtgcacacctttagttccagcactcagaaggcagaggcagatggacctcgatgagtttgaggccagcctggtctacggagtcagttccaggacagccagggctatacggagaagaaaccttgtctggaaaacaaaatcctctgtgctcagagtcaggcttcccagtgctacttattctgttcttggaggaaatgcaggtagacatctcaggactcaaaatgcaaagaggaaacttggtggtgggaatggctttgcactgaagtttctctttttgaacaggagacagccccgtcatcagatgagtctgcagtgcctgacttaggtgtatgctttgcagaaagggagacagagtctgaaaatacccttaggaggcttggagtcaatcctgtgtgtatggcctctctctctctgtctctgtctctctctgtctctgtctctgtgtctctgtctctgtctctctctctctctctcactacttctaagtgcttttgagcaaggtctacttctagaacccatgtaatgctccccagggctgtgctgagcctccgtattacagcacttacccagcctagcatgcatgcgagcctagttctgtccctggtacctttccaggtaccatacatcacctccaaattacctcacagcactgccctcaaaggattcacgggctaatgctaagctgctggcggctgaggtgccagctatgccacagagctggagttgtggtacaattttagaagcatctacggaagtgtagcctctcacgcagacagaaactaaggccaagcttctgagaggagaccattccatcaatgctgagaagatgtgtgatgggggaagcagagggggaaggcagtcccagcaagtaggaaagaaacccagcaaggaacaagggtcagggtaacacacctaaggaaaaccgggttcagggtaatatacctgaggaaaaccgtatttcttgtcttggttgctgggtctaagtctctaagacttagtcctaagtgactaaggtctctaggattaccatggctatattttataatgttctaactcagaaaattaattttttatacttatttagtgtgtgtgtgttgcacgcacttatgtgcccaggagcaccaaggtatgtgtatggaggtcagaggacagcttgagggggtcgctgtctcattccaccacgtaggtccagagatcaaagcttgggttctcatgcatggctgttctcatgcacagagccatcttgctggcagggagcttggcctttatcatggagaccaagaacctctgactggtttcagggcatctgttatatctctctccctctccctctccttctcggtcacccatgtacattgttttatttatttacttttaagggaaaaatattcattacatgcatgatttctaaagggatctgtgagtccatccaaaactgggaagaaccttgccagagagtggtgaaggttttgggtggaggatgtgtggtgtcaatgtggaggatggagagctgagctggcatgcagggaccagctggggagctgttggcagtggtccaggccagacacagtcaagactttaattgtgataacggtaatacagaggccgacctgatttgaggctaatcaagatggtaaaatgttagggtgtggctaatgcttggatggaaaatgagggttggagaggactcagttctgtccctaacaccctcatggcagctcacaaccatctgtgtccccagttccaggggatcagatgtcctctttcagactctgaaggtatcaggtatcatgtggcatacatgtaacaattctaaacttcttcttagtattgtttaaaaagaaagaaaaggcgatgaggtgtcttggcattcccctgtctcatatcgtctaaacccatagctctgtcgccggagagcttatatttatttgttcactttgagttttgtgtctgctggttgagacacagcctcactctgtagctcgctggctttgaactcatggagaccagacttgcctgagagttgaggcaactctcctgcctcagcctcctgagggctgcaagctccggagggcttacaggcatgcactaccacacctggatttacctagttctggtgttgtgcgaaacaacgttgtggtttattaagaaaagactttattagaggctccagcgtgagtcaagcgggttggaggtatgaacagtgtaggaggaaccgtgagcttctcaagagagaactactttagcctagactttgattttagactaacgtcatcctcctggaagcacccttcccagggccactcttttcctttcaaagcagataaatttgggagcctccccgccattttttgattccaacgctccctcaggtccccacctggctttgccacaatgatctgggaatttccactttggaacggattcttgggaaagaaccctcacactgatgacgtcaagttacgcatgagtactgagtcacgctgctacagcaatgtcgccttttaaaatgtctgcttcccagagtttattagaagcaagcagacaactgacatcaccgtccacacgcagagcatatccatcgcacccccaattttcttgtggtcattgtaaacccccggttctctacacacaacccctggcagtcaatcatctttttgctgttgctattttccccctcttttcaaagattgtgtgtggaactgtataatatgtggtcttttgactcggtttacaaagaataatgtctttgggcctgttgatgttttgatcgggctgtcctagaactcatgagatccacctccccctgcctcctgcatgctaggattaaagctgtgccccaccatgtctggactctcagaaaaatctctgcaattacctcatgctattatatatcagtattttccctttctattgctgaatagtattctaatgtgtggctatgtcgtagtttatttatctattaagttgccttttgaacttccgttttctcctggtttctgccaattatgagtggttttgtaaaaattcaagtacaggcgcatagtgttaatttctcctgggtaaatacataagcatggtattgtatagatgggttttaggctacataaatgcgtaaccatcttcatctgccccaagggcatatagggattgcagttgctcaacactattgtctgcacgggctgcagtcaggatttctgggtttgtccctggttcccctctcagcctgggtcggagtcttaatattttgctgccagcttccctcccggcctcccagttctaattcacagcatgttgtggttttgacttgtgtttccctatgtggctgatgatgtgatgcaattcccacacacttactcatttccttgctttgtgactttcttattgttgcgtttgaggagttctttgtatattatggatacaaatgatgttgtgttgcataacagtttcccctgaagttgaaacatttcatcctaagcagggagataaaaataacttcaaaacagcttcaagaagcccctaaaactgaagggattcactaggtccctaccagagtaagcaatagaagctgcagagacgactcttgagatgatcatgaccaactagctgcccgggagaaacagaaactagcagcgctgcctgcaagaggcttagcccaatggagtcacttggaaaggatgctctccaacctgctgagctgcctgcaggctgtgcactgggctccgggttcccagctgtgtgagctcatgctgggatgggctttggtgatgcatcattctttgagtcatttctgctcttgtaagtgacccctcacccatatttttgtaacaccaataaaactcactggttcaagccagctggactttggtggcatctggatcttgctctctcgtgggctctccatctgggctgaggagatgtgcttatcacatccctccaggaatgcctcttatcatacaggaggagtgatcagaaaataccgttgttctgagaatttggatcggttgcatccatttgaaggccacgcctctgtaatgctggggctggggatgtagggataggttgatcccagtggcttgctggccctcttggtgaaacagaaactcaggttccgtgaaagaacctgtctcagaaaattaggttgtgagtgatggagactgtagtgatttgaataggagtggtccccatagactcatgggtttgaatgcttggcccacaaagagtggcactgctaggaggtgtgaccctgttggaggaagtgtgtcactatggaggtgggctttgaggtctacgctcaagctaggtctagtgtgtcagttcttcttctgcctcaggtcaagttgtagaaccctcagctccttctccagccaatatatctgactgcgtgcgcactgtcgtgttttctaccatgatgaaatcagactaaagctctgaagctgtaagccagcctcaaataaatgttgtcttttataagacttgccttcgtcatggtgtctgctcacagcacctcaacagtaactataacagagtaacacacacatgtcaatgtctggcctctgtatgcacacacacacacacacacacacacacacacacacacaaacactcacacacacacacactcaagtaaaaagtcagttattcccaaagaagccagaaaaaagaagacaagggaattaaaagcaaacaaagtacatagaaatcaaaggacagaatgatagatttaatcacaccaataatctcataaacttaacaccaatatcacagcaaaaaggtaattttgctgtgtgacgattttattttcaagttctttataataaagttttaattaaaacataaaaatgaaaatcagtatttaaaaggacaaagttaatttcattaaaagagaaaagttcaacctttgtgccacataaatgaagtttcctacacatgagagaggaataggctaagcagaaaagaatgagtggccaggagtggtggcacacatctttaatgccagggctggggagcaaaggtagaaggctctctgtgagttcaaggccaacccagtccacacagtgagtttaggtctattagagctacagagtgaggccctgtctcaataattaattaattcattcattcattcattaaaatgaagggaaaatttcatgctaaccctaatctaaacgtctagaaggaccttagcagcatcagaatgtgtttcggggcagagtcacttgtaatggaaggcttgttttatcaaaagaacaaaagactcctaaccatccatccacgtgtctaggaaagctgggaactgtgtgtgggagctctggctgaggtgcaaggaaaatccagcaaatcggccatcatcttctcagggttcagcctctgtcagtcattagcaccggcagggaagccatcaatgaggcaaagagaagtcttgaccaactgtcgaccaagccgctaagataacagcagctgaacatccacccccacccccacccccaggcgcacgcagctgatgagcctacagggacagcatctgctctgagctacaaaacacgactccaacaaacttcggaagattccagatgtaaaagatgtatcatttgacagaaacggtaccgaattagaaattgctagcagaaaaacgtatttgagaaatcaaagcacggttatgaagagtccacgggtccagaagaaaccagaaaatcaaatgtagtttgaactgaagagtaaggaaaagacgatgaatgtgataacatgtgaggttcctctaaagtcatgctcgagcagggattaccactgagacgcccttctagcccgagctgttgctgttttccagttttggggttttttttttgttttgtttttgtttttttgttagggattcaactgagcacctcacatgtttgagggaagccctcttttactgagtcatgcccccagccccaaatttagaacattagattcttattagatatttacttattaattagtaattacagcttttagctacagtgtcatgattttgagacagaggcttgcttgctctgtagcctaaagagtggtctcaaattcatggacgttatctgcctgctcagccttttcagtgctggtattataggtgagagccactacaaaagaataaagatctcaaagcaatggcttcacattaaacaagcaaacaaacaaacagacaaacagacaaacactgagaggaagttaaccgcagtgttgtgcaagtttaatccccgcactcaggaagcagagacaggcagatctctgagttcaaggccagcctggtgtatggaatgagttctgggtcagccagggttacacagagaaaccctgtctcaaacaaacaatacaaataacaacaaaaaacaaacaaaacaaaaaaaatactagaaaagaagaaacaaaaggaaaatagcagattcagctccatataagcaaagttaaagaaaataatcatagctgggcgtggtgacgcgcacctttaatcccagcacttgagaggcagaggcaggcggatttctgagtttgaggccagcctggtctacaaagtgagtttcaagacagccagggctacacagaggaaccctgtctcgaaaaacaaaaacaaaaacaaaaaaaaaaaaacaaaaaaaaaaaaaaaaaaaaagaagaagaagaagaagaaagaaaagaaaaggaaaaaatcatgaccagggctaaaacccaatgaacgagagaagcagagcaatgacaagccgaggtaaccaaggttaataaaaggcaaggaaatgagcctcagcaaggccaccaggaaaacaaagatcagacacagatgcagtgtgacgttaaaagccccgtgtgttacaaatacatatcaccctttacaaaataacctttaaaataaacatattaccctttaaaataaaccttgaagaacttgaattgatcaaactatctgaagagagtacatcaccacagtaaaacaacaaagaaacaaagaaacaaagaggggacactgtctatctaaggtagtatgccggaggaagagggaaagtcttgtaggcagaagatgactcagctggtaaaagtgggcaccacactagctcagctacctgacctgtggcccacacacagatgcaatgatgatacaatttcaagtgacagaaagactgatggtcttgttgtagcagacgttgctgagaatgcagctggaatcccatgtttagctgcaggacaatatctgaggacagcaacctgtttgaagcaggaaactttggaggataaaagaaaagctcacaatcgatttgagtgtgtgtgttggggtgcttgtataggtcaagctttaacacattatacccatcacctaagttaaatgctctaacgtagtcaatttaagtgaattagaccataaaggcatcatggttgttataattgattggttggtttggttttttgagacagggtctcactagataaccttggctggcctagatcatgctatatagaccaagcagggttcaaatgaaaggaatttgggattaaagacaagacacgcaccagctcagcagctaagagcactctgttcttccagagttcctgagtttcgttcccagcacccacatagtggctcacaaatatctgtaatgggatctgatgccctcttttggtgcgtctgaagacagcaacagcgtactcatatgcataaaataaataaataaatcttaaagacatgcctcaccacacttggcaaaatcacatttttaaaagagtggagagtaaaaatgctagagactgtgatgagaagggaactaatatcccagaggctctgagattacaagggacagaatcggctgggcacatacacttatttcctgcctctattagatctatcactcaagggccagtaaaagatattctgaatgacaagaacacactcttgagtagtccctcactgctaaaggcagtgtaagagccactgggtcggtgaataaatttgattctggtggcctttgtatagagcttttttttttttttttggggtcaaaatatcgctatgaacactgggatatttgcatttatttaaccaagaagcttaaatgaagcgcaacatgaaaagtaccataatgaaacacatcactctgtgtgctagctcaaaagtaattaaaacgaaataagcaaatacctccaaaggctctaaaaatacctaagcttgagggcttagggttgatgtacctccctggaaagaacttactgatagagggtcacctagcatgcatttctgaggtctttggtgtgctctctaacagaagaaggagagagagagagagagagagagggagagagagagagagagagagagagagagagagagagagagagagagagagagagaggagagagagaggaagctgtccactacgggatcccagaattagcaactgtgtcaacttgacacagctggagttatcacagagaaaggagcttcagttgaggaaatgcctccatgagatccaactataaggcattttctcaattagtgatcaagggggaaaggccccttgtgggtggtgccatctctgggctggtagtcttgggttctataagagagcaggctgagcaagccaggttaggcaagccagtaaagaatatccctccatggcctctgcatcagttcctgctttctgaccggcttgagttccagtcctgacttcctttggtgatgaacagcagtatggaagtgtaagccgaataaaccctttcctccccaacttgcttcttggtcatgatgtttgtgcaggaatagaaaccctgactaagacagcaacctaagtttctctctcagcacagagggagaacattgccatggctacagctagctccatgggatgccctgctgtcattcagagctacaacagctttcatgaaactttccttcctgtactcgcttctgactattcgtcccgtgtgccccccccccccccgcttgcatttcgttctcttgttctgtggtaagacatatgctgattttctccctacagtgtgcccgtaccaacgtcattatttttttgttctgctttgttttacagttgttttgtcagtaatgattcttgagaccgttacaaaccaagacctgcctgtgatcaagtgtgttttaatcagtcatgagaacaatggctcatcagcgggaaagccatcatcgtaccgaatggtaaagtaacgtgaacacctccgttctgccctggaggctagacttcataggctagtgagacctgccatggctaagtgggcacttctatcccttttctgttccaaacactatactgccagcttccttgctaccatgacatcaaccacttcccggagggtgagaggccatggattgaactccagcactgagggttagtctgagccatcatgtcagtgctgggaattgaacctgggtcctctgcaagaacagacagtgctctaatcacggagccaattctctaacccccattgctctctcttttaaaatatcattgtcattattattattattattattattattaattttattttatttttttttaaagatttatttattattatatgtaagtacactgtagctgtcttcagacacaccagaagagggagtcagatcttgttatacggatggttatgagccaccatgtggttgctgggatttgaactctggaccttcggaagagcagtcgggtgctcttacccactgagccatctcaccagccctattattattaattttatatgtatgggtgtttttgtctatatgtatctctgtaagccatatgcatgcatggtgcccacaggggtcagaagaggacactgactcccctgttacttgaattccaaaaggctctgagctgccatgtaggttctggggactgaacgcgggtccccttgaagaacagccagttatcttaaccactgagctagctctccggccaccgctctttgatactagtcatctaacatagctattcccacctgtctacttcttcaaatatgtgcttagtgaatgtactcaaatggaggacgcttatatgatacagaagtgtatatacagcaaataaggacagatctgccaactctaccgacatttctagtttaggattcattaactgttttctttcacagagatagaaaagtacatataatgctatggcttgcccacccccaactatcagagattacaaataatcttgaattttaaaagcaatatgaagtgggcttcaaaagcaatatatatatatacataaaacctcaatttaaaacatttttttttcatggcagaaactgttttggttttttgagacaggctttctctgtgtagctctggctgtcctggaactcactctgtagaccaggctggccttgaactcagaaatctgcctgcttctgcctcccaagtgctgggattaaagatgtatgtcaccatgccctcctggcagaagcattattggttttaatttttaaataagtattggcagtgtaacgatctgacttatcaacaattaaggcactttagtatataatagtgtggagaacagatgaagtcctaagtgaatgtgtgtggttggttgacaggaacactatcatttcagggactcgtgggaatggtaattccttcgccgggtcagcctcgggggggaaaggcaaggtctgagtaaggatgtctagaaagtatcaaccatagcctcttcctcctgagtgactgtagcctgaaactgctcccctccaactgaccccctacccaaatcatctaacctgcctccttggtgagccgtatatagcaaacaccgtatataacatcaggcagctggcaagtctccatcaaactgcatgtcccacccgaccccagctcttcttcgtggatgtctgtgagtttgctttatattcattttctggtcgccccaggacgggttgagtccagagcttacaggtcacagcatagcagcatctcagtgtggatataagagcattgtgtggtactgtagtttcaacttttttttttttttttttttttttttgttcttaatattgtttattagcacaaatgcagacgtaagaagtctaaaccaattgactgaacaattcctattccacacttatagttaacagcttaaggtatttcactacaggtttccacaaattgtgattcaacccttgaagtaatttgcatataagataaaatacattaactacatggtgtcttgtagccaggtgtccattttacatatacgaggtaacaaactcatctttgcaaacttgttaaataccattgtttccttttaagaaggaaaaacaaattccattttttttgaacaagaaaataggactttacataaatgacatgtacctatacaaatttaagctgatcaatggaacacaagtatctacacatgctttcttttgtactaaaagtcagctaatcttgcaaagtttcagctctaaaagtcgctattaccagtttgtctactgtagcaagataccttaagttacaacaaaatcctgggaagtaagactgaataatatctgatatagaaatagcctactctttaccaactcccacccccaccctttcaaaatcataagcagctctcttctgtgacagacaaatcatgtaagaactgaaaacccagtttatgtagcgtatctcttggtccactgtctggccattctgtcgtgttctgctctgttggtcatgtactgagtggcaatacttcccaccaaagggtcagcaggattgcagtctgtaaggagtgagcagatagaaaggaggactttcgagatggttagggctgggctccagttgtctttcaatatgtccaagcaaataactccttggctattaatattacagtgataaattcttgtacgaaatgtaacctttggaggcttgaaaggatactctggtgtaaaagtaatgtcaaggaagaatactccaccttcatacacagaccctggaggacccagaatggttgatctccactcatagatgttgtcacccttgggaccagcactgcagtttggcggagggtctaaagtgatgtctgccggctccttctggatcctcttagcgctggtggagagaagcttcgaatttttgctcatgctgactttactctccttcttcttgggggtgctgccttctttctcggtctgctggttggaggacgaagatgacgaggagctggtgctggccctcgaatcgtcatccgacatagcgaaccccccaccccaccccgcgaacggcccctctctttgtgtctggctgctccgtgccgccgccgcggctgctgctgcggctgcgactgggcctggccactcgtgtctcgctctcactgggagagctagtttcaacttttaagtaccttcccaacgtaagaaaatagatatgtacacacgtgtggtttttatcacacatatttctgtaagtgctagctcagacggcatgtgcacatacgaggttcttaggcgtgctgctgaattcccctccagaggcttgttgggtgtgaattcccatagccgtgtgtgagcatgcgcacttcctcaaagcctcgctatcagaatgtgtgggcggacttttccatgtttgccagactcgggagatgagaagtgttttcatttgtgtgggtttcaacatcttcatgtgtatttgagggccactctatgtttttgggaaaaaaatggaccattaaacttttttttagatttattttgtacataatgaatattttacatatatatatatgcaaataaatatatgtgtcttcctggtgcccatggacctcaaaagagagtattgaggggctggggagatggctcagtgggtaagagcactacctgctcttctgaaggtcctgagttcaaatcccagcaaccacatggtggctcacaaccacccgtaatgagatctgactccctcttctggtgcatctgaagccagctacagggtacttatgtataataataaataaatctttttttttaaagggtattgaatccctggagaatgaagtcacagatggttgtgagccaccatgtatgtgttgagaatcaaacctgggtcctgtaagagctgccggtgctcttaaccgctgacctggttttctaatctcctttnnnnnnnnnnnnnnnnnnnnnnnnnnnnnnnnnnnnnnnnnnnnnnnnnnnnnnnnnnnnnnnnnnnnnnnnnnnnnnnnnnnnnnnnnnnnnnnntgctatcttcagtacacaccagaagagggcatcagatcccactacagatggttgtgagccaccatgtggttgctggaattgaactcaggacttctagaagagcagtcagtgctctttttatatatatatatatattttattattacgtattttcctcaattacatttagaatgctatcccaatagtcccccataccctaccccccaccacttccctacccacccattcccattttttggccctggcattcccctgtactggggcatataaagtttgcgtgtccaatgggcctctctttccagtgatggccggctaggccatcttttgatacatatgcagctagagtcaagagctccggggtactggttagttcataatgttgttgcacctacagggttgcagatctctttagctccttggatactttctctagctcctccattgggggccctgtgctccatctaatagctgactgtgagcatccacttatgtgtttgctaggcccgtcagtgctcttaaccactgagccatctctccagccctttgttttattttttttaacgacttttggcccttatgatggctgcagatatgttgggctatttggtcatatccagaagtcttgcacaaggggaggtttgatgacaaagtgcctcccaggtaacatggacaaggccacccttgatccccaacattacaaaaagagaaaaaagaaaaagatctgttgtagataatatttactcatcaatcagggctttctaccccacctttgatcattcagttcctagataaaggaacaaaacctttatatttatgataaacttctaaagcattagagctgggcagatagcttccctctaagctgttagaatctatttccccaacaataaccccaagttataatttgtcatgtcctgcctggccactcttactccagttgacccgccctcctggccatgttttcatgattcatctactctatgatgtcttccctctccagcttcttctttcccttgtggtctcctgcctcagttcccaagcctggcatttgaaactccgcccatctctctgctgcccagctgtaggtatcttggggcaaggttacatagtgtcacttgatctacaggaggatctcctagttcctgaggtaaccagagccagtatgtagcattccaatacatagcaacagaccaaacccagtatgtagcattataatacatagcaaccgaccaaacccagtatgtaactttacaatacatagcaacagaccaaacctcaacagttttaaattaaggagcaagttttgcataacaaaggctgttaaacctaagaatttactcttgtgtctagacctacagaattcagcattagcaacagaccaaacctcaacaaggatcatataccttcgctgtggttacatagagaagtcttgtctcaaaacaaatggaagctgggtgtagtggtgcctgactttaatcccagcaaaggcagaggcaggcagatctcttagtgttgcagccagtgtggtcaactcagctattctggctcaaactcctctcctaggagactgattcaaactagcttctttcagctctgcttggcctcattctaactttggaaatatggtctaatcttctggctccttctcattacctggatcattctgtcttcacctgtgtctagtttgttctctctgaaacctgtctattttatacaactgtcctggtaaaattgccttctctcctcttctccctctctccctctcttcctctcttcctctctcttctcatgagagttaggtgtatgctattctgtcagatctttctctgattcatcactttgtctgacaactcaattagacatcactttctcctcttttacagacttatttatttattttatgtatatgagtacatatggttgtggctcactttggcccaaagatttaatttattattatatctaagtacactgtagctgtcttcagatgcacccagaaaagggtgtcagatctcattacggatggttgtgagccaccatgtggttgctgggatttgaactcaggacctttggaagagcagtcagtgctcttaaccactgagccatctcaccagcccctagacatcactttcaaacatgggtgcttccttctacaaactaactttagcttcactgtttgggattaaaggtgcatactaaaggtgtgtctatattccagccaaaaggattaaagttgtgtgctaaggctgagccgcatcacaactagaaacaggtttttccagtaaacaacacaatcttggggtttacagtgtgatcaaatatcctgcgacagaagccccttggactgatgggtttctgtatttagctgttcttccagcagagaaggcatgggattcaggctcttccataccccctgccttcccactgaacgcttacagccctccctgggcatggactcctacccacaccagggggacctcccactttctagccttcccttttgcttctgcttgatcactttcatttggactgcccttccctgttctgtgcctgtcaaccctcccgtgttttgcatttcttcaggggtctatgtgtactgggtgtgtgctgtgtggttgagcttctccaccagccctttggttccatgtgtgcccagcatgtgccatgtggttgagcttacccttgagccctttggttccatgtttgcccaacatgtgccatgtggttgaccaccagccctttggtttttctgttcatgcctcctttgttccagtactgggtttggaaccgggggtccttgctcagccacacagtattctaccaccctgcccagtgaactacagtgctcagtacctatagcttttccatttgcatggtctcatgttctcagtgggacaggactatggagcctgcagaccagtcactgcacattcatgagcctttgttcttatcttctcctcgtggtggtcaaaacagcatccaccgtgataacactgaaatcaagtgcgctcctatggtgggcatctacagggttcaaagaagtgcttcattctggggtctcaaagacaagcaagctgactcatgtggtctgaaactggatggggccaccgccatacatcttttgcttataggaattggctattcagtcattttccacttttcttcactgtgtcctcaatttttagaagtatttattttattttatatatgtgagtgttttgcctatgtgcatttatgtgcaacatatgtgtacagtttcctcagaggccagaggagggcatcttggaacaagaggtacagacagttgttagctacaatttctgggagttgaacaggctcttctgggagagcatccagtgcttttaaccactgagccatctctccagctcagtggtaccttcctagtaggtaccagcagagttggatagctatcctagttagggtttcattactgtaaagagacaccatgaccacggcaactcttataaaggacaacatttaattgggctggcttacagttttagaagctcagtccattatcagcctggtgggaagcatggtggcacacaggtacacatggtactggagaaggagctgagagttctatgtcgggatcagcaggcagcagagagagagagagactggacctagcttggggcttctgaaacctcaaagcccatccctagtgacacaccacaaggccacacctactccaacaaggccacacctcctaatagtgccattccctatgagcctttgagggtccctttcattcaaaccaccatagaggcagaatatcaacagatatgcaaacaggttcaatgctaaaaaagatgactccacgttgttccctctacctcacaggtgcgaggatccccagaagacctccagtgtaccccgaggcgccagagtgaagggacagtatatgaagcggccaccgtggaggtggccgagtctgggtccatcaccctgcaagtgcagctcgccaccccaggggacctttcctgcctctgggtctttaagcacagctccctgggctgccagccgcactttgatttacaaaacaggtgagggtgggcacagaccaaactggtctcagagccaaattgcccacataaaatggagttcatttggacccctgcccttgtttgattttgtttttgcttttccctaaattcaagattctccagcttctgtgtaagggatgctgaagttgtttacaggcatacaccactgggcctgactgagaatccatccgtgtgtgtgttttgacttctctctgctgaaataatgaacgcacgtaggattaggatatgggcacatgacgctgtgtatctgtcatgtgtaggaggtgctgcccaaaaagagacattaatggcatctgtagacgccagctggtggtgatgagggttagggtaacccatctctcttcttctgttagcacaaaccagacctgcacacgatagtgataacaccaagggtgtgggtgaagtgggcagatccaatgctgctccgagaaataaaacccaaggcaccggagagatggctcaatggttaagcacatgagctgctcttccagtggattcaggttgggtttcccagcacccacactgccacttgtaactgtctgtgacttcagtcccaggagatctgatggcctccatggacactgagtgcaagtgatgcacatagattcgtgcaggcaaaacactcatacacatacaagaagaataaatgaatatttatatacataaataaatataaatatttaaaataatttaactttaaaggttgatgtacatatgtaatttgtaaccttgatatgccctgacaaaataagtattttgttattgggtatgagatacatctgtacaaaatgtttataacaactaatagtaccccataaccttgtaaaattgcggcttttcccactgctatagccctcttctactactgagccaaatctcacttctgagggtgggtgttaggtacaagtcacagccgagctgattgtgcccaagatgagcctgggtgctggaccagagccgggttctgcacagagcagcccttagccatagcttcgaagacagcgctcaccctctgactcatggagaagctgaggctgttagtcctgagtgttttccagagaatccagtcctctttctcattccgcagaggaatcgtttccatggccatcttgaacgtgacagagacccaggcaggagaatacctactccatattcagagcgaagccgccaactacacagtactgttcacagtgaatgtaagaggtaagtgtggccgcctcctgggcacttcctgcgtcccgaggcagtgcgtgcttcgggacctagtgtgcttccactcatctctggggtcaccaaaggtagctactcaggactttttaacacagacctggaagaactgcaaagagtattttgacttgggaataataataataattttttaaaaaatcctgtgtctccaaatttttcccaggctaacctcaaactcagtatgtagctttgaactcacaatcctcctgcctcatcctcctaaatcttttgattgcaagcacttggcaccttgctgactaaatgtcctgggttttatttctggttctaatactatgagcttttgaaggggaatgaaagcccatacctccgagctggggcggtggctcggcagttaagaacactggctagtgtaagcaggggacatttttaaaaaattttttatctcatgtgaatgaattaaaatctgaaaatagataatcgcatacagccagggtggctgctgaggatgacattggtttttgcagatgtaaactgtcagaccggtgccttaactggcgcagacatggtgctacatgtaccgtgcaccctgttttccttcctgtgactgcagaggtggctgcatgtagagccttgtgtctttgggggctcaggcagtgccacaggctcagggttggcacccactaagctgcctgctgcacattgctaggctgcccttttccctgtggatgactcggattcacgaagctgaggcagtgtgcagccacagaggggcctgtcaggagtgaccatggtcaggagtgaccacggaggcccttccctatggacctccgcatgccccacctcaggtgctcacagaggttggcctgtgtgttgatatgaacacagacacctgatgtgtttgtgactggcaaaactgggggcccacgagagccatttctgcacttgcttgtcaccccacttggagccttggtggcatttgtggtcctatcgtcatagctcctagtactgggggacactctaggttccccgagggtcatcatcctggatcacacagtcagcctgcatggcaaagtcaagaacagagtggtctcacccattttctcagagaagtgactgaaacaggaacacaaacccagaagtacacaactcaggagctgtcttgtgctgctctttgcctgggcctccacccctgccccattcctacctcctcaggcctctggtgggacatttaagtgtgggctctttgtccagtgaagatacaggctccacgggctccttctttctctctcttttgcaacactgtacaagcagttgtgttctagaagattaacagattttttttttttctgagacagagttttactatatagacctggctggccctctgtagtccaggttgcccttgaatacacagacatgtatgtctgtctctgccacccatgtatggcacaaaagtgtgtgccaccactcctgcctctatgctgcttttaattttacattatttttcagatgaaaaaatacagagcaaccatgatggcagaacacttgggattccttcagttaaggcagcttagggagtgggggtggtgtggtgtggggagctgcgatgcgggtggatcagatggagtgatacagggaaagtttgccccaggacccctgagctaactcacacaaatagtaattagcatagtaattagctcccagtggcctcagctcctaattgaagatgcttaaagccaacagcaaggtttttctttccttaagataaggtctcagtgtgcagcccagactggctttgaactcctgatcttcccacttcctgcactggggcttacagacacacatcaccacccctggcttcagtgctctatttaagagaggggcaagcccttgaagtaaggaggctgtccaacctttgaacaccacaacattgctattgtggtctgcaaatgtcttgtccccattcagaacagttctgggaacatgacacttaagggtactgacaggttcgacaaactctgatgtccctaccaaagtgtagaatgggaaccaagtttagaaattacagggataaaagatgaaaactaccgcagaatgagaaaagatacttgtagtctacaaaactatctctactattaactacagatagatagtaacaatatataaagagcatctataaataaacaagaagcaaagctaaagcaaaatatctccttttcagtaattgaataaaaccgtcattatttttgtgtgtgtatttaatgtatgtgcatatgtatgtatgagtgtgtgtgtgtgtgtgtgtgtgtgtgtatgtgcatgtgtgtgtgtaagttctagtctaaatggcaggctaagctcagtcgctaaattctgctctagttttaactgcatcctaatgtttctgcctttctccatcttattaacttgcacctagttgtagatgaaatgatgagaagaaagtaaattttaaatttttgtaagagctgacctctgtgttcttgctcttttcctctccttttataccccatctcctgatttcaccttactgatttatctatggacttgtgaaccctaagaaactgacaactgtgtgaaaccagcatcacacgtggcatgctgatgcatgcctttaatcccagcagcgcttgggaggtagaggcaggctggtctctgtgagtttaacatcagcctggtctacagagcaaattccaggccaggcaaggctgcagagtgagactcggtctcaaaacaaaacaaaacaaaacaaaacaaaacaaaacaaaacaaaaacctgacatcacctgaggctggggaggagccagactttgctgtggtgggatagattagctgtttagaaatgccgtggggatctttgaggggctgctgggaccatccgaagtgttaaaacggtcatgtttcgtggtgccttagatacacagctgtatgtgctaaggagaccttactttaggaagatggaaaaccaggatgcactgctctgcatctccgagggtgttccggagcccactgtggagtgggtgctctgcagctcccacagggaaaggtaagacatgccccctagtgaccgtgaccaccgttcctggcagaatggtggctgttttctactgtcattgacttcataaccaaatgtgatatttgatttttgtttccttcttcgtttcaacagaatcactgctgtggatttcatggtgttcgggggagggggggaatgggtggtttttggcaagagggactttgaaagcccctgaagtagctgagggactcacaaccattgcactacaaaaaaaacaaaaacaaaaacaaaaacaaaaaacaaaaaacaaaaaacaaaaaactgaactgtgggtttgttggattgattccagagccttggtgtggggggaactgtaatctccttatgataggaagtttcttatgagtaaatgtttcatttgtgatcattatgtttcctctcaagaggccatttatagaattgttaaggagctggaatccagagcctgagacctttggacccttgtttgtgtaataagctgtgtgtcctcagataagttaattaagctctctgttcatctcaagagtgaggatggaaaaaatgcaaacaaaaatagtcaggtttttaaaagaagaagaatggggttgcctggagtgagctgagatgtgaggccacagagccagccgggcagggcgctgggcatagaatacaaggctccttctgcctctgcctgagctacagctgagttcccgaggtgtgagaagccctgccatccgaactagccaaatcagctacactagataattgctgaagaccaagtgggataaagcaagagagagggaaagtccaaaccagatctgcttctttaatgatgttaatgcgaccttgaatttcgtgagaaaagaccagtgacctcaactgtgagtgtgtgccacgcatgtgtgtgcacatgtatgtatctatagatgtatgtgataggcatatagactgagaaagttggaagggtgcgtgagtgtgacagcagttgtcttgtatggggtgacaggaagttggtgacttcagatttgaaaggaaagtacccatgacttgctggagaaagacagtaatgatgaccacccagaaagcccagaatgccccaggaaagcctcgtgggggcatttcctgcccaggcaaggcagaagaggagtgtcactctgtgcacactaccgtggtctgctggtcttccctgggaatcatacctcggctttcctctccagtttgctttgggaactcaacctggtgcttcactctccactcctcctctgtacttggaagaaaacacaccggtcatgtcgagctacattgcagaccagctgtgcttcttgcctcattttctttctgagttcatccatgttttctttttggcctgtcttcaaatgagaaccagaagaggaggaggaggaggaaggagacggaggaggaagaagannnnnnnnnnnnnnnnnnnnnnnnnnnnnnnnnnnnnnnnnnnnnnnnnnnnnnnnnnnnnnnngaggaggaggaggaggaagaagaaggagaagaagaagaagaagaagaagaagaagaagaagaagaagaagaagaagaagaagaagaagaagaagaagaagaagaagaagaagaagaaatcccagcactcaggaaactgaggcaggaggattgctgtgagtctgaagccagcctgggccacatagtgtggtcaaagccaacctgaactgtatggagatagcttgtctatggggaaaaaaaatcaccaaataaaataaaatctaaaatattaaataataaagtaatactgtaacattatcctaattagatacagagtagctagctggtccctgcagattccaggctggatacagttgagttaatttttcatctgctcttttcttccatccctaaaaatatactttgtaacttcatcccctaaacatactgggtccccccaccccaatcccccagtgctggtgaccttgaacacagggtctgccctgagcagtgctgacagcctgttagctgtcattttgaagcatttcctgaaggaaacttaccttatcattgcagctgtaaagaagaaggccctgctgttgtcagaaaggaggaaaaggtacttcatgagttgttcggaacagacatcagatgctgtgctagaaatgcactgggccgcgaatgcaccaagctgttcaccataggtaatgggggactgtcggctatgtgtccttagtgacggttcctaagggaccggtgatagcttctgtgtgggtaatcattccacttcagaaagatgatggaaagttatactgaaatccgaatctagatcgaatagtccacattctgacataaaagcaattgaacacacaggtatggccaagcttggtggcccgggcttttaatccttctttcataggactttgatttgattcaatttgatttgatttgatttgacttaggtgctgggctcaaacccagggactcagagcatctgctttgccactgagttccactccagatcttttgcaccactttatttatttatttattgtgtgtgtgtatacacacattaaatacacacacatacacacacacacacacacacacacacacacacacagctacagcatgtaatgtggatgtcaggttctcttcttgtcatatggggcccctggatcaaattcaggtcagtctggcagcggcaggcacctccacccactgagccatcttgatgccccgttcataccatttacaatgtaacactgtagattctgtaagggaggatttctgcaacaaagggtattccatctcgagtgggtggttttactctgtcgcttttttttttttagttttgtgctgctctgtgactccaggtcttctccaggccagcctcttttaccctgatcttctcagctctgcattgtttggcttgattagtgatggcagggatgctgacaccattgcttttcaaaacgtttgcgacacttctgagctgaggcaaaagtttttaaaaaaaagatgtgcttttttttttttttttttgtcttctttgggatatttttatcttctagatctaaaccaggctcctcagagcacactgccccagttattcctgaaagtgggggaacccttgtggatcaggtgtaaggccatccatgtgaaccatggattcgggctcacctgggagctggaagacaaagccctggaggaggtaacagcgcccacccgtggtgtttaccgtaagctctcagcgtgggctggaaacccggaatacagactcccctttcattaatactcagggcagctactttgagatgagtacctactccacaaacaggaccatgattcggattctcttggcctttgtgtcttccgtgggaaggaacgacaccggatattacacctgctcttcctcaaagcaccccagccagtcagcgttggtgaccatcctaggtaacgggctcacgaaatttggggttggttggtttgtttgtttttaatgctgtcctggaactcgctgtgtagattggttggccttgaactcacagaaatctaccagcatctgcctccccagtgctgggattaaaggcacaggccaccaagcttgactctgcttgtgtctttagtggctttccctgtggaatgtggactaggcaatctagattcagatttcagtataattttccatcaagaaactaaacagaaaggctggtgaggtagctctgtcaagaaagaccatagctgccaagcctggtggcccgacacccatccctgggaccctggtaggagaggattgactgctgtgggttgtcctctgacctctacatgtggcctttaccaactgtcccacccaaaacaccatacatgagtgtaatttttaaaagttcacttttacgtttattttacgtgcatgggtgttcttctgcacccacgcctgtgcaccagtgtgtgtgtacggtgcctgcagaggccagaaaaaagaccttcaggtcctttgggatgggagttaacaggtggctgtgagccgccgtaagggtgctgggaactaactgaagttctctggaagagcagccaaggttctaaccattgagtcatctgtccagctacaaattgtaaaagaagctgagttagaatagcatggtcaggataagcttccctctgctttgctctctgtgccctgccccacccctccttcttggaggcctttggccaccagcctgagaggacaaagggagcagaggcagagagccaggtccagatggccctgagtatggcggaataacctctggagaccactgcagcaaagccagtctactttattgtttcagggataggatatatgaggacattttttaggggtacgcgttaaaagggctaactggtcataacatcatttgagcgggaagagctgattggttataaagcagtatttaattattcgggtgggaagccggagggagatgtgtgtgttgagttatgcagcctcgcacagagctctgtacaaggtcattttccagacaaggccagccacctgtgttcagggacactctccagacagagacagggaagccccactaagaaagggagaccccattttgctctatctggtcttggtggactgctaccatcatagcgaggttctccaacagctttcctgctcagtcacatatactcagatgtcaccggcttttctcagaccacattgcaagggaacccatctgtgtatctgacttcgttcttcatggactgtagctgcctatggatggggcagtcctgacgtctatccttggagtcccagaacctggtactagacacgtgcctaatgaatccttgttctgggaatgtccttagtgagtcatgacagtgggcactgtactcatgctgggtgcctagggattgggatgcccgtgagggcttcagcgtaacagccacacataggtgatgccacatagtgtgcaggctttcgtcacgtgagcaagccgaggaagcagagcagtatagaggctcacggggaggccttgctcatgtatatcactcaccacatggctcttttacttgtacctggaggagattatcttacagagagcctgtccctgggtcctcagcaagaggagtatgtcctctcagtttctgagtcatctctctagctctaagatctcatccctaatgcaaatcctgtctacaaaagatgatgggctctgtctgagttcttcttctgtttcttttttggactagcccaaaccacagctcaactttgtctatgctttctttcattaaactgacaaatttttaaaaaaatcatgtatggtaggtctctatgttgatcagcctggtctacaaaggaggttctaagttagatggggctagaaccatatatatatgtatatatatgtgtgtgtgtgtgtgtgtgtgtgtgtatgtatatatgtatgtatcacatatatatcataacatgatatatgtgatatatgtatatatgatatatgtgtgtatatatgatatatataatccttatacaaatatcaatatctaatttgtaaatttcctttttacagaaaaagggtttataaacgctaccagctcgcaagaagagtatgaaattgacccgtacgaaaagttctgcttctcagtcaggtttaaagcgtacccacgaatccgatgcacgtggatcttctctcaagcctcatttccttgtgaacagagaggcctggaggatgggtacaggtgagacacacagcacagccctcctccctcgagaaggacacacacaccttccccttccccccaaggtcccacccaccccccatcccctgcaccaccactaccaccacctaccccccaattccccggcccccatccccggtatcgagcacctctgtccccgagctatagacttagccccctcagtctgtgagttgatttattgttgagtcagaaaactgaagactgaaagcaaaccgcacctgtgaggagagccacttttccttctcttccgggactaaagcctgctgcatgaaaacagaatcctggcagttttctgtcaagagactgtggtttcctgtctaagtgctgcgctctgacagtaccgggcggctaagtgcggttgtgagtgatgggggagtcggacctccttgccaactgaaaacatctgccctaggtgtactgatttatgttctcaaacacaaatgcagaaatagcccgagcataagtcacaaaagaggatctccttctcctgggggtttgttcaactctggtctagagtgttctggaggcgaacgtctcattccttctttgaaaagcaaaagcctgctttccccggtttcttctgttaactatggtgcctcttctgtctttctctcctttacagattttagttttagccatgtgtatgtgggtgacagtctgtgtgtgtgtgactgcggtgtccctggaggccagaggcttgggattcccctggagttggagtcacagtggctgtgagctgtcccacgtgggtactgggaacccagctcaagtcctctgcaacggcactgtgggtttgctcttattcgctgcaccaaatctgcagcacagctcatggagaaacactgtctcaacaacaacaacaacagacagacaaaaaaccaaacacacaaaacaggaatgtagaacatctcattaataattttcacactgaggctatgcttcaatgattgtttgaggtatgagagttacagagatcaacgaatgcactcagctttcccctctctttacttcatatacatatctgcaggggacttaaaaggaaaacgaggcagctgtctgttgctctggtcactgtgacaagagctgacctctttctaccctctacgctgctcctagtgtttctttcatgatagtatgcttttttttaaaaaattcccataagtgatttataattggtctttgagaaagtgtgtgtgtgtgtgtgtgtgcacatctatctgtatctctctctctgtatgtctgtgtttattctctctctctctctctctctctctctctcttgtgtgtgtgtgtgtgtgtgtgtgtgtgtgtgtgtgtgtgtgtgtgtgtaggatggattccctggatggaactggacttataggcagttgtgaaccacctcatgtaggtgctaggaatcgaactcaggtcttctggaagagcaatgcttgctttaaacccctgagttctctctctacctctaaatttgcctaggggggtaggggtgtcttgtggggtgtatatgtgtgtgtgtgtgtgtgtgtgtgtgtgtgtgtgtgtgtgtgcgcgcgcgcgcgcacccatgtgcagaggccagatcaacatcctctgttgtgctccactgttttttaaaacaatacttcatgtaatgcttatgagtgttttgcctgcatgtctatctatgcacgtgtgtctgctggggcatcaggtcacttggaaatggagttatgggtggttgtaagccaccatgtggatcctacgaatcatgcttttaacctctgactcatctttctaaccctctcaactatttttttttttttgagacagactctctcattgaacttggatcttaccattttggctagactggctgacctccataccccagcactaaggctacagagcacgcactaaggctactgcactcaacttttacatggtggggatctgaattcagattctccggctatactacaagctttatatacagagccaccctctctgcttcctatttgtattatttatttatttatttatttatttatttatttatttattggtggggagaaggggacagtttgagaaagggtttctttctctctgtatccctggctgtcctggaacttattatgtagacccgactggaccttacactcactgagatcttcctgcctctgcttcctgagtgcatcaagctatgcaccaccaccacaccaggctcgcataagctcttatccagaacttgaattccagaaggagaagacagggaggaacggatgaccatggagcctgttttcaggatagctggcttgctggcccctctgtggtcgtgtgagagctaacacagccttagggactcctgctgcattccaggatggttgtgaacctgactcaggtgaaggaggggataaacctggtttaaccaatggtaaggtcgcgatgcagcaacacatttaatcctagcagtccaggggcagaggtggctcatctttgagttctaggccagcctaggctacacagtgagttctaggccagcctggactatacagcaaagggccatgtgaatgggtaagaagctgccattttccttctctcccagaggatgcatattgtcactgtgtaacctggtgacacacagcagaccctcttggggtatcacggagctgtgtctgccatgcatgcatcaggagctgggctaggtagccgcatttcatcctgaggctccaacctacaagcctgaactccagacacgtcccatcccagctagagccgtcctgtgtccctttcatttccagtcacctgagagcagcttcccagatgtgacatctcagctctgagtttagaacctccataaagatggccaggctgtcatctctctagctccgtcccgtgcctcatacaggaaatgtgtgtgtgaaccaggaaacggactcactgccactcctggacatgacttcttggagaaagctgtgcctgtgttgtcttgcgtacagcacacatggcgcccagtgcttggcgtgagattctctgaaggttcccagagaataaaaaacatggcagcaaggaagcctgaggtaaagcagtcagcgctgaacaatgtttttccgtgttctatgatccttctctctgctgtgtaggctctggttgaggtgagaggtaactcaagctctattcaactttaatggtggaaagtttcaaatttgctaatacaccaaaggaactggcatccactcactctcactccagtccaaagatttacttattactatatgtaagtacactatacctgtcttcagacacaccagaagagggcatcagatctcattagggatggttttgaaccaccatgtggttgctgggatttgaactcaggactttcggaagagccatcagtgctcttaaccgcggagccacctctccagcccaggagctggcatccttagctccccactagattctgcagttctgttgccctgagttgggatggtagaggatcgagatcatgttttgagagctgacctgagtggcgggagagttgctggtttgttggttttttgtttttttttaatctgtgtagtagctgaactactgcagaagccccgatgcggtcgtggcacacgccagaagtctctcggcttcccgaccatcaaagcttcatttctgcaatttacttcctcaaatcacaccctgaggctccctggggcttgcctttccgtgtttgtgtctggtttccagctgcctggagcccttttacttctgaaaaagagactgaaggagattcaccccttactttgggggcgaattctgtagactcaccgataaatactgaatccgcattagtgtcgtggtagaaaaagtatgagcatggcataacttttccctggagctatttcatcctgtcttccacgtatctcagtccattctgtcccctctgagctcccactgggtgtttccaaagtgaaacaggggctctttcctgtgttcgcagtctggaggacctgctaggggcctgctcaggacaagagtggccacatagaagctcctgaacaggacctgtggcagagctgacatttttgtttttaatggaatggggcttgagggtaggagagctgtgagcctgagtatatacaaaaaggaaggggaagatgtttgtctctagagcaacaccaagaacccaactaaatctgttttccctttattcatgctgcctgtaaccgtgctgcctgtaaccgtgctgcctgtaaccgtgctgcctgtaacggtggccccggcccttcctttctggggccacacagcgagaccctgtcttaaacatatgtagtaaagtgtatttactgtatggttatattgttatatcttagttaccattttttaaagatttatgtattttatttatatgagtacactgtagctatcatcagagggtttcagagcccactgcagatggttgtgagccaccatggggttgctgggaattgaactcaggacctctggaagagcagtccatgctctttttttttttttttttttttttaacatctgccactctttttttttttttttttttagatttatttatttattatatgtaagtacactgtagctgtcttcagacactccagaagagggcgtcagatcttgttacagatggttgtgagccaccatgtggttgctgggatttgaactctggaccttcggaagagcagtcgggtgctcttacccactgagccatctcaccagcccccagtccatgctcttaaccactgagccatctctccagccccttagttataattttggtagctatatagtgttaaaggttttaaaagttgaaacagggtctcactgtacaagcactgggtagcctggaactggagacatagatcagactggcctcaaactcacagaaatgaccacctacctggccctccatctgacactctttatgaatcataagctgattccagagcccttagccaaggttggccttttttaactcctccccctgggagctaaatacaaggaaggagaaagtgacctgatggtagagaggccctcttcctaattgtaatgacactgcattgtctcggtctccaaagatatgtcactggcaactcaaatttcctgatgccaagtgggaaaggggaggtgggggaacctgaaagaaaggaggctctgagctgcctggtacctgacggtccctctccttgctgctggggtcatattcatgggagaaagcgaggtgtggtggcacagacctgtcactctagaacactggaggctgaaggcagggcaaatgcaggtctgaggcctgccaaggtcagacagacaaaagaaagtggtaaatctgtctggacatttggttctgtgtcccgccaagttatgtgatcgatatcctgacctcagggggctctgtctgtctgaggcgaggcacaccctgtggagacgacagcgccatggacagaaaagacaaatcatcatgcagtcctgggctttgttccacacaacacacacacacacacacacacacacacacacacacacacacacacacacacctattgtgtggtcattagtttctctcccaagttgagtggaactctgagcatggtccttggccaactatgtcagtcacccagtccctctcccctcccggtctccatcactgtctctgactccttctctccctctgtttgacataggcgaggctcattaggtgagccacattggccttgcactctctttttaaaggatttatctatttttatttgctgtgtattagtgtttgcctgaatgtatgggttctgtgtccatgtgcacacccggtgcccatggaggccagaagagggcattggatgccctgacggagtaggtgcgagccacccaccatgtgggtgctgggaactgaacctggatcctctagaagagcagctagcactcttaactgctgatcttgaccttgaactctctcttaaccctcccatttctgcctgcagagcactgaggttagaggcataggcatgtgcctgtgccctcagctgcctaccaagcccccccagtccctggttggcctttggggttctcccacaatctttccaccatttcatccctgccccccaacccccgccacatttcttccttgtctagaaggccaggatagaaaatggggaatagggctggagaaatggctcagtggttaagagcactgactgttctttcaaaggtcctgagttcaattcccagcaaccacatgatggctcacaaccatctgtaatgggatctgatgccctcttctggtgtgtctgaagacagcgacaatgtattcatatatgtgtgtgtgtatatatatgtatgtatatatatatatatatatatatatatatatatatatatatatatatatctttaaaaaagaataatttatgatattgagccgggcatggtggcgcatgtctttaatcccagcacttgggaggcagaggcaggcggatttctgagttcgagaccagcctggtctacaaagtgagttccaggacagccagggctatacagagaaaccctgtctcgaaaacaaaaacaaaaaaaaaaagaaagaaagaaaatggggagtagtgatgtaggtcagatggtaaggtgcttgcctcactcctacagagccctggttcaccctgcttccacaaaaccagatcactcagaaggcagaagcaggagttcaaagccatcttgtagcaagttcaaggccagtctgagatgccagagactctctcttttacaaaagatactgggcatagtggcacattgagtccagcctggtttacagagtgagtttcaggacagccagagctacattgagaaactctgtctcgaaaaactcttccttctcctaattctaggccactcagggctacaagagaccctgtctcctcccctagccgcaccccctgcagaaaaagaaagaaaagaaaaggggtaagaactggaaaaaaaaatgtatgcaattctcagcctttaattgccgaaagcactttattttcctttgggtgttcctggggattgaattcagggcagtggacatggcaggcaagcattctagtgcacgcttcacctgcagaccaatggctggagggctccctcctgggaggctcaaagagtgacttccttctcattagccgaccaggagcatctgactaagagatgggccgcttagagcgctggtgcccaggcacccctggctcagagctccatctgtccaggtgtatcttggggccaacagggagcctgcagctgccttattgcatatgcacaccagcacctgcaagtctgtttagctcagggcctcttctgtgtgtcctttcctgcctttccctctgtaggaacattctctgaaacctcaaattccaactttaattctttagggatggcacttcccacaccctagcatatctgctctgtttcccgtccctttacgtgctttagagacggtagctactcgtgtaccccagcccagcctcgaacctatgatcttcccgcctcaacctcgcaagcgctgagacgcaggcgtacatcaccatgcccacttcccataactgtgtctgcttctaacatcacgctgtgaattttaggatcaagaaaacactctgtcttcagatctgctgcaggagatttgattcttcccgcggtcaggtctccggtggctgaatgaactcatgggctcctagactgtcactaccatctctagacttccggccaataacgtctcccactaggatcaggtcgatctaaatgttgtacatgctatggattttgttttcaaacgtccagtgaaaatgtcgttttcacctctgaatattctaggccatttttcaagggtcctaaccaatggaccccatcctacctcttagccctctttgcccagacaccccagcgcctcctcctgtttcagtcaggaggcccaatttctcttccatgccctgtgaccttcccgtcctcaggattctggtggcatctccttagcgctctcctttttgcactcgtagcaaatgggactcccgccttgcctctgagaaatccacagaactttctacgccgcctctgcctctctttggcagctgaacgccttcgacttgaagctttaactgcttcttttgtggggttccacagctcacttgggctgtggtctttttgaagccgaggagaatagctaggccctcacacactgacacctcgttgctgcgtggagccaggagtgactgcaagcctgtctggcaaggccttgtgggaagtcagtggatggatgaatgtgccaggggattctgggatgccccacttcctgtctttcgcttccctgctacatcttgtagtctggccatgtcgtaccccctcaccagccccagagcaacagggacaaccaacagtgggttgaagttgtgtgctccaatcagatttctctctctctgagttgacttatttcagccctctgttatggtgacagaaggcatcaggggagggggacaaattagaacaaagataatgatgatgtatgaaaatgctgtaactaagcccattaatttgtacttttaaaaataagatttatttatttcatatatgtgaatacactgttgctgtcttcagacacaccagaagaggttgtcaatcccattacagatggtcgtgagccaccatgtggttgttgggaattgaactcaggacctctggaagagcagtcagtgctcttaacctctgagtcctaatttgtactttttttaaatttttatatcctgttcttcacagtagcctctcctggaagcaccaagctgagttcttctttaattctttctcaaacagcatatctaaattttgcgatcataagaacaagccaggagagtacatattctatgcagaaaatgatgacgcccagttcaccaaaatgttcacgctgaatataagaagtaagttgaatctcatcttgtctattttattcctccattaatttttaattaagaagagccaaacacagcttaggagggacgatatcaaactaatttaaaaaaaaaaaaaaaggattatttgcatgtatatgagtgttttgtaagtggtatgtatgtctctggcccacatgcatgcagtgcccacaaaggccacaagagggcgtctgatccccttggaacttgagttacagatggttgtgagccatgatgtgggtgttgggaacccagttcctctgcaatcacaaccagtgatcctaacctctgagccatctctccagcctctgaaactgctcttgtaagcgccatgcttcttgtgtgttggctgtagttatatatgtccctttctatacttgttctctgagctagtacatgttccatctccgatgtgctgtgactttactgccttggcgctatgaaaggaacactaaggaaaggctatacagtcacctgctacttatttcttttaatgattttcgtcttggtctatgcaaaataagaaaaagacactatatttcattaaggtttttgcagattttttttacctgcattttttttttttacttgcatgtatgtctgtgtgaaggtgccagatattggagttacagacagctataagctgccatgtcgatgctgggaattgaacccaggtcctctgggtggtatttttaaagctaagtgttacattgaggtttgcagatagatggaggttctacacttcagctccctctaggaggtgagtcatagagaggtgttgcctccaccagtcaagaaagttttgtgacagaggaggaagggaccaaacaaactttgaggcatcctaaataaggggttgttccaggggtacatagcacctgggctaaagaagcagcctaagttgaagctagctctgaactgattctagaaaaaaaaaaaaaaatctatcttccatgagcttactgcgcgctactttctacagagaaacctcaagtgctagcaaatgcctcagccagccaggcgtcctgttcctctgatggctacccgctaccctcttggacctggaagaagtgttcggacaaatctcccaagtaatgagaaccctgacgtctcttgaagtggatgagccaagccgggcagtggtggcgcatgcctgtgatcccagcactcgggaggctgaggcaggaggatcttagagtttgaggccagccttggggaacacagtgaggccctttctcaaaaaacaagaaggaaaaaaaggaaagaagggaaggaaggagggagggagggagggcaagaggggcaagggaaaggagaaagaaaaagaaaggaagaagaaaagtgagaataaggcataagattctatcacctgttgccatggatacagcttaagaatgacattgaaaatgcttaccctacagccacagcttgttttctttgggaaccatctgtagaaaccctgccttcctgtcctaccatgaccccacccatctaacttcctgtcctaccatgaccccgcccatctaacaatccctttccaccattttttttttcttttcagttgcacggaggaaatcccagaaggagtttggaataaaaaggctaacagaaaagtgtttggccagtgggtgtcgagcagtactctaaatatgagtgaggccgggaaagggcttctggtcaaatgctgtgcgtacaattctatgggcacgtcttgcgaaaccatctttttaaactcaccaggtgtgcagccatttgctgttgtgataaacacaccctgtccccagaaattcccccacctgaagttgggcattgtggctggcctttgctggggaattcttatgagattgcccagttctgagtgagcataaggtctttttgagtcaagcaagaatccccagcagactgtaatttgacgtttcaggacccagttatccttaggctgtgtgactcacaggtcacggagctgtggagtctgggaaatccatggtgtgaagattagcctccagaggtgcaggaaagcagacttagtgatctggaatttctgtccttttccattctgtcagttcccttatttactttgagccggctagtctagattttggagttgtgtttagagtctttctaaaatgacactaacagtttagggtcaccagatagtattgattaactccagggacaaaagcaagaggctcctaagttcacgttcagcctgggctccatagtaagacgctgtctcagaaaaatgccaaacaaagcaagcacgtaagtcaaaattgtggctttggtctcagtagttaagaacacaggctgctcttgcagaggacctgggtttaattcccagtacccacatggtggctcatagccatctgtagctttagctccagctctggggggtgggggggaccttaacgccctcttctggcctctgagggctccaggcatgtacatggtacacaaacacacatgcaggctagcagtcatacacataacttctctacatgtgtgtgacgaaccttgataacaaatacacagacttctttttacctgacacgggctctgtaaaaggtttatatgggctttattcacgtgacatcatggtccagtttttaagatgggttcagaatcgtttctgatttttctggggactcattgtttacagaaacaaaccaactttctgtggggcacccagacagaacacacagattgctcataaggcctgaagatggtggttacttgaacaggatgtgagagactctaacaagagacttaaacaggcctgcctgttttatctcgcccccgcctagtgattgcttctcttgcaggccccttccctttcatccaagacaacatctccttctatgcgaccattgggctctgtctccccttcattgttgttctcattgtgttgatctgccacaaatacaaaaaggtaaaaaccggttggcgaaggctcatccctgtcgtgactctgcagcgctgctgacccgctgttcatctctcaagcaatttaggtacgagagtcagctgcagatgatccaggtgactggccccctggataacgagtacttctacgttgacttcagggactatgaatatgaccttaagtgggagttcccgagagagaacttagagtttggtaaggattgactgttcagagcttcggtggcattgcctctgccttgcaaacatttttttaacccgcacttactccatctttacagggaaggtcctggggtctggcgctttcgggagggtgatgaacgccacggcctatggcattagtaaaacgggagtctcaattcaggtggcggtgaagatgctaaaaggtaccaaaaggtggggttatctcagcaaagtccctcagagaacgagtccagctgcctcccctccccttcttctgccctctgcattattctgtctgctaagcactgagggttaacgagaagcaggcaggggcagtcgtgagcaaagactgcaagcagggaaggcaagcccccaccccttcctctttctcattgttcagttggtatcagcttctgtgttacagtttgacacagattctgggtagaaaacacaccggggacttctcacttcccactctgtcccatcctctcccatctggcatccaccctcgagcagggccaccctcagccgattcttaacccagcgcagaggattgaatccaggattttgtgaatgctaggcaagtcctctacctcagaaatacatccccagcctgtcattctataacacgatgtcttgctatataggtcaggcaggccttgaactcacaacttcaagaatgctgagatgtatcatcccctcgggactgatggcccattcttttgctgaggtgttccctgtaaggataaagggagcccctctctccaaacacacacacacacacacacacacacacacacacacacacacacacacactacagagagagtgacagagacagagagagagagacagagacagagagagaggcagagagagacagagacagagagtcactgaagtgcattgcagtacgcagaccaaaaggagaaatggcacacaggacatcatggacagaaatctcacagtcacctcctagccaggtgactgatgatgctatacatcctgggttacagaaagaaacggaagctggaactgttagaggatagctttaggatacatacatttgccgggcggtggtggtgcacacctttaatcccagcacttgggaggcagaggcaggtggatttctgagttcgaggccagcctggtctacagagtgagttccaggacagccagggctatactgagaaaccctgtctcaaaaaaacaaaacaaaacaaaacaaaacaggatacatacattttctgtagatcaaattcaggatgtgaaaagggatagactttcccctctgatatctgcaaggtacaaaaccttgaagcaatgtcagaacacgatcacttgttacatccggggaacagatatgaaggtttctttttacactgtttttcttcacccgtacatcctagttccacagaataaggagtgtcgtcgctgtggtattcccatatgtatactttggtccagttcactagcaccgttccccctcccctcgtcaattctcttcctgtcggtccatttcttcttctcaaatagctcccccctctacttccgtgccttttccttttaatctcgatcctacatatgagagatgatgcactgcttgtcttcctgagtttggcttttttacttaacatcccagtgtctggttccatccatcttcctgcaggtggcccatcccgttcttcgcagccaaatacaccacttcctatggatcgtatttccaacatccatccatccatctgtggcaggcccctaggctggttagatagcatgttgattgtaatagtgccaacatcgacttcctgtgtggagttccttatgcctccactcgctccacgcactcaccaaggacccccctctataacccagcttcatctcctgtaccaatagctctcataactggttccctaagccttggctttgtgtgcccaaatacttgtatctcagcactgttcatccaggctgaagtcctccaaccctggcctccatctctactccagcctggtaattactggaacgtttcagtgagactacacattccacacaaccatagaaacaaggaagcgggttccatagctggctctctctcagccttccccaacaggtttcctgcacagtgtctgctgggcccatcctcatctctccgtggtctctgtggtggtccagttctgtctctcctagagactcttaatggtagcttttaaaaagcatcccaccgattctgctaggggctatgtgctgaggtggggcatggccacgatgcagaacaccttcttgcttggcactgccctaagcattgacaatggctttctactgctctgaaaatggttcccacaggggctggagagatggctcagtcagtggttaagagcactgactgctcttctgaaggtcctgagttcaaatcccagcaaccacatggtggctcacaaccatctataatgagatctgaatccctctcctggtgcgtctgaagacagctacagtgtactcacatataataaataaataaatcttaaaagaagaaagaaaaaagaaagaaaagaaaatggttcccacaactttgagcagtgcagccgtggctcagcctttccgcctcattcttaaccttctttcggttccccagagtgcctcgtttccctgcccacaggctttgcgcaggtgaatccttccacctgctcttccccttttgctgtaggaagccacttacctctcaaatgtcagctttgagatcacttcctcagggacacctcctttcacgccatggacaagatcaagtccctggggaccgtgggtgttctaagtggtacaagacatactcagcatgcttgaggccctgagacgaattctaacattaaaaatatagtacgtcctaagaacactatgtagacttctcccagaatcggagactctaacacagttgcgtttagggattcagttaggttctaagccctctgaaagcggcatgtggcttttcccgtgctgttgttacttaatactgtgtattctgctgcctccgcctgcggtggtcttgtgtgactcctttcggttccccactgagggagaactacagggtcctgctttttcgggctgtctggtgtcccccctagagttcccccacaggactttcactgtctctctctcatcttgtgtggtcatccctcagtttctgcaggaagttggttgcacagtcccctttgcagacgccagggtcccagacgatcaggtcccttctataacacaacagtatgtgcatagaaccaggagtccctggaacagagaccccaaagaaaggtgttacccttgtccccgaggccccaaaacccacggatgcaagggtgccccaggcagctatgctagcctcagtgaccagagccctgggagtaacaacccatgcttgcatcctagcaagatcgtggacacagtttgctccactggagagattgcattggttcatgtgttgtcttctttaactttcccccattgagcacacttaccaatggaagtttctagacctgaggagcaacttcatgttggagacatctgtgcttgctgaacctcctccttctggtcttcctatcagctggataatctgatttttttttaactaggaaaatcacgttctgtttatcgtgttgtctacctgctttgagagctgggtggaaggacttttatttttctcagggaaagtcaagtagaaatgtatattcttgctgggcatggtggtgcataatttgatcccagctctcaggaagtagacgtaggcaggactcagtgaattcgaggccagcctaatctgcagggtgagttccaggccagccagcgctatatagtgagaccccgtctcgaggaaggaagagattatacattcatatagttaatatctataactcacgttttaaaacgctgtcttaaaacacagaacattattgtctaaatttatgtgttatttttgtgtcagtttttctcttccagttttgaatgtgtgtaagttgtgatctgaaccaaggagagccttggtttctaaaacagcatacagttccctgaggtcaatcctgtttctgctcctccaccaacagagaaagctgacagctgtgaaaaagaagctctcatgtcggagctcaaaatgatgacccacctgggacaccatgacaacatcgtgaatctgctgggggcatgcacactgtcaggtaatgtctacacatctgcatatcgaagccctgttccacactactgcagcccaagggagcgaggcctgcgctctttcctcagccccagtttgtagacgatgggtctgtttcttccttccagccccatgctcccagaaataagactcagactcaaaatatatttacaaataccttgaccatagagctaggctctcctttgactagataaaaacttaatataacccatttattctaatctacattctgccacctgtgctcgggtgccatgagcctgtctcgtctcgttttgtcacgtcttcctgggtgaatctcccaagcctggctctatcccagaatcctttctgtctcccagatgtcctacctcttatttcattcctaaaccataggccatcagacttatatgggcataagctattctcttcacaccagttcaagtggaattagacggtgtcccctctgcagagcacatgaccccgtctttcccctactctatctgtcacagagtcctaaccgcctgagagaaagcggccaccctgcacattcatgttgtggggtctgagctcctccctagactgtgaagctggcctaaatgcagtagtgacatcagcttcagaactcagcacacacatactgatatgttgatgatggtgaggtcagacgtttagaactggagagaaaggctagaagacagattcttgtatacagtgctgagatcgagtgtagtctaatgtacgagctcatttaaagcaccttctgagggcaaggagagcaggaaaggcccaggtcctgttgcgctacagtgtgattttggaggaaagacctgacctgtgtctaaacctgtaactacaattgtaactgtttcagggccagtgtctgcagtctgtctaaccttgtaactacaattgtaactgtttcagggccagtgtacttgatttttgaatattgttgctatggtgacctcctcaactacctaagaagtaaaagagagaagtttcacaggacatggacagagatttttaaggaacataatttcagtttttaccctactttccaggcacattcaaattccaggtaagagctccatcagaggtttatggctgtaaaccccgggacagacagaatgaccactgcacacacctacctgcaaccccacccgggcaacattcggagttgctgtgtgtggcctgagacctaaggcagctatttgtttatgctgggaatttctgtcccattatttcttattttacttaataaagtttcaattacccaccagaagacatggttcaaagatcctaaatagaaaagtccagaaataaacaatccttaagttttaagtacctttacaaacagcttattaattaacattatactatcttatcattggttattattgttcgtgtgttactatgcccaatttatttgtactttacttactattatatttcatttattatttattattgtgtgagtttgtagtgctagggggcaaacccagggctttatgaatgcttgacgcatcctccctctctgagctacatccctagtctgccatgcatgctctagaggaactatcctaacacagacgtgcgtagccaataattagatcctttggttcatttttggtcactgggctattaaataaactaaaagcattaagccttttttcaaagggaaggggagttgaaaactgggataaactcttatggtgggaaatactgagtcctgacctatttgtagtggtgcgggcctctctttgatgcgcttgaaaaggtaatctggccagacagtggtggtggtggcatggtgcacgcctttagtcctagcactcgggaggcagagacagatctctgtgagttcaaggccagcctggtctactgagagttccagagcagccagggatagacagagaaaccctgtctctaaaaaccagaccaaaacaaaacaaaaacaaacaaacgaaagaatgaaagaaagaaagaaagaaagaaagaaagaaagaacaagcaaaaggaaagacagaatctgttgcagctatttgcttatccctcagaggaggggaacgtggttcacagacgctggcttgaaaagatggcgctggaaatgtacaccttcccacgaggcagaaacctacacatcaaacacattgatgaaaagaatatcaaaactctaaatttgtaagctctgtgttgcatgaactctgaaaggtgaaatggcctgtgtctggagcagcaggatgccctgtaaattggttcctctctttataaacttgaggacatagtaatcatttactgccccagtttctgttttatgtacccagcttacagcgtgacagtgactgaatggcagctcttatccaggttggctcggcaaattccaacacacagatgtttttaatgtacacggggtaccgttgacaagccagcatcgtgctttctgtttaaaagcccatttgtaactgaaatctgttcctctgatgaattgtcctttttgtaataaagtgtctgctcagaggaacaatgtaaataacaaaggaacaaatttatttttaatagcatgcctggttcacgagaagttcagttacacccgcccttggatcagctctcagggttcaatgggaattcaattcattctgaaggtaatgttttacttttcattggtattttacactcactgaaatgaatccaagagtcccatgccagctatttttaaacttttttaaaaaattatgagtgtatgtgtgtatgtgcatacacgtgtgcatgcatggtgtgtatatgtgtgtgctgtgtgtatgtgtgtgttttatgtgtatatgtttatgtgtgctgtgtgtgtatgtgtgcatgctatatatacatatacatacatgtatatatatgtatatatatgtattgtatgcatgtatgtgtgctgtgaatgtttgtatttgtgtacatgtgtgtgtggtatgtgtgtgtatgtgtgtcgagtgtgtgtatatatatatgatgaatgtgtatgtaaggtttgtgtttatgtgtatatgtgtttttgtgtagggtgtgtgtttatatgtatgtatgtgtgtatatgtttgtatgtgtgtatatgtgtggaggatatgtgtatgtaagtatgtgtgtgtgtttgtgtatagagtatgtgtttatgtgtatgcgtgtgttgtatgtgtgtatgtgtgtgtttatgtgtatgtgtgtatatatgtgtggaatatgtgtatgtatgtgtgtgtttgtgtgtagggtatgtatgtatgtatgtttatgtgtatgtgtgtggtatgtatatatgtatatgtgtatgtttgtaggtgtatatatgtatgtgtgatatgtgtatgtatgtgtgtgtttgtatgtgtgatatatatatacacacatatacatatatatgtatatgtgggtttgtatgtgtgtatatgtgtgtgatatgtatatgatgtgtgtgtatttgtatgtgtgtggtgtatatatatatgtatatatgtttgtgatatgtgtatgtatgtgtgtgtttgtatattgtgatgtttaaagatatatatgtatatatgtatacgtgtgtgtctgtgtgtgtggtgtctatatatatatatttatttatatgtatatgtgtgtgtttgtatgtgtgtgatatgtgtacatatgtatgaatgtgtgtggtatatatatgtatgtgtgtatatatatatatgtgtgtgtgtgtgtgtgtgtgtgtttgtatgtgtgtggggtataagtatatatgtgtgtatgtgtttgtatgtgtatgaagtatatatatgtacatgtgtgtatttgtatatgtatggtatatgtgtgtgtatatatatgtgtgtgtgtgtgtgtgtgtgtgtgtgtgtgtgtgtgtttgtatgtgtatatgtgtgtgtgcttgtgtgtgggcatgatcgtgccgtggcacccatgaaggtcaactagtaagagctagtaccagggctcagtaccagggtgtcagcctgatggtagcttttctccagtgagccatggcagcagagtggaagcagtgtgtctttgctctggtcaaaggcagactctgtcagtgcacactttctcggaaagtcaaaagctgatagttgtgaactctgtgtccatggtcaacaacaggcacctgaactgttttgtttgttcagaatattctttataaagtcataagctaattggagccagcttgtacctggtaagactgtgagctctagaatcagagtttggttatgttccaactcttttcctttcgaaacagttggctccagacgagagtccccacttctcacttataaaattggtccaattctactttcctcataggactgttaggaggcatacacagaaggttgtgaagtataaagtacagtccatgaaatgtggtagacagttggtcagtctttgcttttttctactgacagatttacctagcatgaagggaaggagggataatgtttgggagttttgcttaccctctctgtctgtgcaccacctgggtgcagtgcccttggagacccagaagagggcactcgatgctctgagactggaattgtgagccaccatatgagttcagggaacagaacccaggtcctctgggagagcagccagtgctcttgaatcactgagtcccaagaaggattcataattagtattccttgtcttagctcagatggctttaacagattattaaagactgggtatcataagctacagtatttctcacagtttcagaggctactgctttcaaaactgaggtgcaggagacacttgcttctcacatgcacatggtgatctttctgggtcctcaggcctcacacagaggcaagagtacacgctttcttctctttaaaaaactttaaaaaaaaagtatttagtgtgtgtcttgtgggggagcaacttacaggaatccattctctccttccaccatgtgggttccagggattaaactcaggtctttcgcctctgtagaaacacctttacctgacaagccatcttgcccattctcctcttcctattttatagagttcatggtcccatttttataacctggccacttcacaaacaccctactcctgataccattgcttgagagttcgtttgcctgtatgtgtgtatgcatgtatgtatacacgtatgtatgtatgtatgtatgtatgtatgtatgtatgtatgtatgtacgcacgcatatatgtatgcatgcatgcatgcatgtatgtatgtatatgtgtatacatgcatgtatgtacatatgtatgtgcactgtatgtgcctggtacctttggaggccaaaagatagagtcacattctctggagctagcattgttacagacagttgtgagccatcatatgggtgctgggaaccaagcctgggttctctgtaagatcatccagtgttcttagctatggagccgtctctccagcccctggggatttgaacagggcttcattccagaaaacagaatgagtgttcaagtagactaagaggagacaggtttatagagacaaaaaaatgactaagggcaggaaaaaaagggaggcagagatcaggacaggaatgactgtgcacaactttaacccaagcatccaggcggcagagtgttagtctgtgagttcaaggtcagctaagtctacatagtacatttcgggacagccagggccacatgttgcttatgaggacaggctgatcattccaatcatttccccgggtttggagtcaggaaatggacaaggtggctagtagcttagcaccaggctccccaggagaagctcttctgtaaggtttgaagcagaggccattccatcttcatgcccaggaacctggcctgcgcagaaggtttgatggttgcttcggatttctccgaaggtcaaataatcctttctctttgtatggcggaccttttgtctgggtgacgccattcgatttggtctattgagtctagagcaggagatcagatcaaacgcctcttataaatatctccacactgaggtcgccttagctgcctctcacagaggtctgatagggtactgcctagtgtctggggaaagtgacaagtggacgtctttttacagatgagattgaatatgaaaaccagaagaggctggcagaagaagaggaggaagatttgaacgtgctgacgtttgaagacctcctttgctttgcgtaccaagtggccaaaggcatggaattcctggagttcaagtcggtaagtaccttttaaagagaaaaccgacagaaggcgcaaacacagagccgcagaaaggaatgcatgcgtgcagctttgaatgagccgtgtgtctacgtttgttccatggtcattttaacatgcctcccttgctgtctgccctgcttcccctaattcttttcatacctgcagcacgaaggcccagagtcactggttagagccaacgtcccgtgggatgtctagggaagtcccagaaaagccatactgaaagaagcacagtatcacagtatcgtcatccctgccaatacagggattcattcgggttgttccctgcagtcgggggcatgagcagaggcccaaagttcaccagctctgccaccccagccagccagcctgaacagattcagcctaggctagccacagcgctgtggaacctgtctcttctcagtggctggccctgtattcacaagtgctgcagcaggaagactgcgggacccaccccaaaccatgacctccccgtgctgcgctaggcaatgctgcttctccacccgctgtcccctgtcattccacactataagccaccaaagcctcaaatctttatgtctgctgaagtaacatggtagtaaacagattagcgggggtggggtggggggggagacaacatctttagctgtgtacgcacctacacaaactattgaaacacaaggaagggctaggttggtgtatcttactaagtttctccataggaaaagatgtctgtgtttcagaggggtagtatgttaattagggctccctaaagaaacagaactgatagaattaaaaataatacatatatatgtattatttttaattataaagttatatatagggctggagagatggctcagtagttaagagcactgactgctcttccagaggtcctgagttcaattctcagcaaccacacggtgggtcacaaccatctgtaatgggatctgatgaccacttctgctgtttcaagagagcaacagagtactcatataaaataaataaataagtaaaaatttaaaaagttatatatataagtatatatacatataaaattatatattgttttactctctatgtaaaaatattttatgcacagacatacacacatacacacacgcatatatgggggatttgttagagcggcttacaggcagcagttcatgtaatccaacaaggtgcacgagactggatgtctcagaaatccccatctggagtcccggggaagtcttagaaagcaggtggtcctgggtctacattgggatcctgaagaagtcagtgagaaagcaaccacagcagcagagcagatggacttgccagtaagagtgaaggcaagcaggcaaaatgcaaacgcttcctccttcataccctctatggctgccaccagaaggcgtggcccaggtgttaggcaggtcttctgacctcagaatccagaaattctctgtcccccgtgctgcagagccgcaatgaccagtttagataatccagcacagtttgttcatgttctctaattacagcaggcctttttatttttactcttaggtgtgttatgacatggacttttgaagagcatccagttttttttttttaaagatttatttattattatatctaagtacactgtaactgtcttcagacgcaccagaagagggcatcagatctcatggatgagatgtgagccaccatgtggttgttgggatttgaactcaggatctttggaagagcagtcagtgctcttaaccactgaaccatctctccagccccgggcatccagtttttagacggtttgtcttcactgcagccttccgctccaatcatgccaagcactgtgctcttccccactctgtgactgtgtcacacatttgtgtggctccatgcgacactgtgctggggcagaaaaccaatgaggatgtgacttcagggcccacaggttttatgtttctaggagaaagacaagcagacctatacatcagatcagtgtcttgtgattgatactgtcactaaagttagcatggctaccccaaggaaaaaggggtgaggaacaggcaagagagcaagagagcctccctcggatggaatccagagggagagggactagtcaaagccagtccaggctgggcaggcttcttgctggtcagaaggagccttcccagagcagctgggaagaatacgggcagggcaggtagtcaggaggacatgatggggatggggacagacatctaggagatgccacatgaagaaagccagacttggagaaggagggcaggagtcacggcacagacattcctgtttttataggctttgttcttttaaaggctgaggagagcgtagtggacccccatggacaccatgtgctctcttacagagttcattcccttcagagactctgggctctactctcatgtactcctcgaaactcatcgttatcttctgtctgtctgtctgccccctgtaccctgtatgtgcatgtgaaagcaagtgtgtgtgtgtgtgtgtgtgtgtgtgtgtgtgtgtgtgtgtgtgtgtatgagaatgtggggcccatgtaccgtagtgtgtgtgcagaagtcagaggacaaactgtgggagttaattcttccactgtgggacccaggaatcgaactcaggacatcagggttacatggttaatgcgttttctcactgagctatcatctctttggtccccccaaactcacttcttctgaatgctttcttcaatcttaatctatttattcatttagagacacgacctctatgtgtagtccaggctggcctcaaacttagaaatcctcctgcctcagcctctccagtgctgcgattatggatctgcaccactaggcctgtcagatatgatgcacttttattctgaaagccagttctttatccaaaagggattctgttctcgcacgcacacacgcacgcacaggaagccggctgttagaagcgtctctggagctaggcgaaggccccctttggcacttctttggctcatagctccagggatgcctcagatgactgcagctgagttaacttaggactcagccagtgttctcgggatgtatgacagtcatgggtctctgtcctctgtaactgttgtgagtctctctctgaaggtgtaagtcacagaccatgtcattccagcctctctcttccagtgtgtccacagagacctggcagccaggaatgtgttggtcacccacgggaaggtggtgaagatctgtgactttggactggcccgagacatcctgagcgactccagctacgtcgtcaggggcaacgtgagccgtttgctttttgtcacgagtacaggaaacacctgcactctctgtgatgcgtttttgatttatggtgacaccaaggggagaaaaaaaaaactcccagtgcttcacttctttaggctgaaaagattgttttgtgctcactaagagctaagcaaaatagccacgcatctctggggggctggccactcagaacagatccattaggggttggcatgagatcttcacctgaaaaaaaaaatgcccttactcagacctgtttcggtttccttagctataaagtggctttatatgtgttttatgtttccgatcatgagacaagctagcatgtataaaaagctttttgttttttttttttctgaacaggcagcacacaggtattcactataaagtttaaaggtgctgtagttaactggtagcgtttgttaccctgttactatatgaagagttcaggaagactccaaatacaacataactgacatgtgttcgttcaaagagaatgtgagggggccagagagatggctcagtggttaagagcatagagtgcttttccaggggacccaagtttgatacccagcacccacggcaggatgctcgcaagcatctataactccagctccaaggaatctagtgcctctggcctctttggacatgtgtgctcatgtgcacatacttacacataagtgaaaatcaattcaaagtatgatgaggcaaaaaatgaatgtttaagaagggaagaaagagagagagaaagaaagatagacagaaaatgatagatagataaacagacaaatgattgatagataaacagacagaagacatatagacaatgatagacagacagatagacagtgagatgtctcagcaggtaaaggtagttgctaccaagcctgagggctggagttgccccccaaaaacacatggtggaaaaactggaatggtataagttgacctctgaccttcacctgtgtgccgagcatgcaccctcccccagcgcccacacacatgcacaggaataaaaacataattattcttcttttcatttttcaagacagggtttctctgtgtagccctggctgtcctggaactcactctgtagaccaggctggcctcggaannnnnnnnnnnnnnnnnnnnnnnnnnnnnnnnnnnnnnnnnnnnnnnnnnnnnnnnnnnnnnnnnnnnnnnnnnnnnnnnnnnnnnnnnnnnnnnnnnnnnnnnnnnnnnnnnnnnnnnnnnnnnnnnnnnnnnnnnnnnnnnnnnnnnnnnnnnnnnnnnnnnnnnnnnnnnnnnnnnnnnnnnnnnnnnnnnnnnnnnnnnnnnnnnnnnnnnnnnnnnnnnnnnnnnnnnnnnnnnnnnnnnnnnnnnnnnnnnnnnnnnnnnnnnnnnnnnnnnnnnnnnnnnnnnnnnnnnnnnnnnnnnnnnnnnnnnnnnnnnnnnnnnnnnnnnnnnnnnnnnnnnnnnnnnnnnnnnnnnnnnnnnnnnnnnnnnnnnnnnnnnnnnnnnnnnnnnnnnnnnnnnnnnnnnnnnnnnnnnnnnnnnnnnnnnnnnnnnnnnnnnnnnnnnnnnnnnnnnnnnnnnnnnnnnnnnnnnnnnnnngggagtctcagtaccatcatccctgcttatgaaatgacagcagcccaggctgccccagttcctcctctctgctcgacactctcagtactcacttcggtctgaaaatacccactctgtgaagaggaaattgagacaaagaaaagcaacttgcccgcggttgctaacttgccccgtgtggatgcgagcgtgcagagcctgcatccctgtcgttcacggtggtgtcctcctgactaacttcctacaggattctgattttacttcctaggttctcagaaaccaaccaatacaatcaatgacatagccctttaacccaaaatgagaactccaatgaatgctcatctcaggtggcttagagccggttcccagggatggtcgctggctgtggttacagtacactgacctctctgtgtgcttatggggttttcaccccaccagtgggctctcctgtgggaaggtgaattccgttcagaaccttctgttaatgaatcaggtaacccagcctggaccacagattgggccagtgactccatttgcataggatttaaaagaggatttccttctggggctcttctttagcctggccaattaaacacatgaggttcctactggaaccaaatcagaacaaaactccgtgccccaggagctaaccagccactgtgtcctgatgcaaatcaaagcctgtgcaaacagaggccaaccccctgtcccgcctctggaagttattcaagccccggagggcagctatggttactctaggcatgatcacgtaagtccttgagggcgatgcttctcagttctgaggaaagctcccgtaaatgattctccccgcggccttgaacttgtcgacctctgagcaaatacagagctcttccttaacgaacgaacggcatcgctacggcacttgccaatcccaagcacaagcctgtgtccaagatgacttttaaagaagtgtattttgccaggagtggtgccctacgcctttaaacccagctctcaggaggcaaaggcaggttgatttgtgtgtttgaggccctattctgcttatgtcaccagagctacatagtgagaccttgtctcaaaatagaaaaacagatgagctggacggtggtggcgcacgtctttaatcccagcacttgggaggcagaggcaggtggatttctgagttcgaggccagcctggtctacagagtgagttccaggacagccagggctacacagagaaaccctgtctcaaaaaagaaaagaaaaaaaaaaggaaaacaaatgatagatagatagatagatagatagatagatagatagatagatagatagatagagataagagagagagagagatcgctataggtaggtaggtagataggtaggtatagacaggtagatagataaacagatacttagatagatgttaaatatagataatagatgataatgggtggatagatggatagatagataagaaacgtatttctaaaaagcttctactttttctttttttctagaacatgattttaatattttcaacttaatattcaacagacagaataattattttaagatatattttgttgttatgtctccttttcatttctgatgttattaatttgaatactgtctctgtgccctctggttagtcaggctaagggtctatctatcttgttttttctcaaagaaccagctcctggttttgttgattctttatagagttctttttgtttctatttggctgatttcagccctgagtttgactatttcctgccgtctactcctcttgggtgtatttgctttgttttgttctagagctttcatgtgtgctgtcaagctgctagtgtgtgctctctccagtttctttttggaagcactcagagctatgagttttcctcttagcactgctttcattgtgtcccataagctttgatatgatgtgccttcattttcattaaattctaaaaagatagactttactttctttttttatttcttccttgaccaagttatcattgagcagagcattgttcagcttctgtgtgtatgtgtgctttctgttgtttttgttggtatttaagaccagccttagtctgtggtgatctgatagggtatatgggattatttcagtcttcttgtatctgttgaggcctgttttgtgaccaattatatggtcagttttgaagaaggtactgtgaggtgctgagaagaaggtatattcttttgctttaggatgaaatgttctataaatacctgttagatccatttggttcataatttctgttagtttcactgtgtctcgatttagtttctgtttccatgatctgtccattgctgagagtggggtgttgaagtctcccgctattattgtgtggggtgcaatgtgtgctttgagctttagtaaagtctcttttatgactgtggatgcccttgcatttggagcatagatgttcagaacagagaattcatcttcttagatttttcctttgaccagtataaagtgtccttccttatcttttttgataacttttggttgaaagttgattttattcgatattagaatggatactccagcttgtttcctgaaacaatttgcttggaaaattgttttccagacttttactctgaggtcgtgtcagtctttgtcactgaggtgcatttcctgtgtgcagcaaaatgctgggtcctgtttatgtatccagtctgttagtctatgtctttttattggggaattgagtccattgatgttaatagatattaaggaaaagtgattgttacttcctgttatttttgttgttagaggtggaattatgtttgtgtggctatcttcttctgggtttgttgaaagattactttcttgttttttctaggatgtagtttctcttcttgtgaagtgttttccatctattatcctttgtagggctggatttatggaaagatactgtgtaaatttggttttgtcatggaatatcttggtttctctgtctatggcaatttagagttttgctgggtataatagtctgggctggcatttgtgttctcttagggtctgtatgacatctgcccaggatcttctggctttcatagtctctggtgagaagtctggtgtaattctgataggtctgtctttatatgttacttgacctttttcccttactgcttttaatattattcctttgtttagtgcatttggtgttttgattattatgtgatgggaggaatttcttctctggtcgagtctatttggagttctgtaggcttcttgtatgttcatgggcatctctttctttaggttagggaagttttcttctataattttgttaaagatatttactggccctttaagttgggaatcttcactctcttctataactactatccttaggtttggtcttctcattgtgtcctggatttcctggatgttttgggttaggagcttttttgctttttgcgttttctttaactgcagtgccaatgttttctatggtattttctatacctaagattctctcttgtattctgttggtgatgcttgcatctatgactcctgatctcttccctaggttttctatctccgggtttgtctccctttgtgatttctttattgtttctatttccattttagatcttggatagttttgttcatttccttcgcctgtttgattgtgttttcctgtaattctttaagggagatatttatgtccttcttaaagtcctctatcatcatcatcatcaggagaagtcattttagagcccaatccggtgtgatgtgtatccaggacttgctatggtggaagaattgggttctgatgatgccaagtaacctcggtttctgttgcgtgtgttcttacacttacctcctgccatctgattatctctagcgctacctgccctggctatgtctgactggagcctgtccttcctgtgatcctagttgtatcagagctcctcggagttcagctgtctctgggatcctgtggttctgggattctgagatcctggggtgttcctgggtgcctgggtccctcctgctggtcccagttacttctggtggtggaacaggtgttgctctcctcctccacctgatcatatcctccttttccatatcaagcattaaaagtgttcttaggtttaaattttatcatctaatgctgggcaatggtggcatacacctttaatcccagcactcaggaggcagaggcaggtggatctctgtgagtttgaggccagcctggtctacagagccaattcctggacagccacgggtgtatgaagaaaccctcccttgaaaaacaaaaataagttgagtaaataaataaataagtagatattgtcatccaatggaaaacaaaaactaaaacttggaaaggctggagagacagctcagtggttaagagcactggctgttcttccagccgatccgggttcaattcccagcaccttcatgtcagctcacacttgtttgtaactctagttccaggaaacacagcacttttacagacagacatgaaggcaaaacaccaaataaatcttttttttttttaagtggcctcaagttttaaattttatcatctaacaacaacaaagaggggctggagagattgctcagtggttagagcactggctgctcttgctgaagacccaggttcagttctcagcacccatatagtggctcacatccatctagaatgtcagtttcaagggatccgacacccactcctggcagcctctggcactgtatgcataaggtgcacttacatacatgcaggcaaaacacccatgcacataaaattaaaaacaaaacaaaacaaaacaaaaaaaaactttaaaaaaatctccaagtctgcatgtgggggaacttcaccagcctctcttgaatcgtacacaggcacggctgccggtgaagtggatggcacccgagagcttatttgaagggatctacacaatcaagagtgacgtctggtcctacggcatccttctctgggagatattttcactgggtatgtgtggcactctgcaggcctccttgggctctggctttgtgtcccccacccctctgtacccttcctttaccctgcatgccaagggcggttaacacaccactcaagaccctagcttctagtcttgcctctgttgccagagttatttgctgacatctgagatctttctttcccacactctgtaattgattaagaggcttggggccctctggatccacttgcagccctcagtacagggtgggtctggcactggggaattctctttgcttgttttcagacagaatgtataccaaatagacaaataggaagaacagtgtttgtgaggccccactgagcgcgtgtttttctcaggtgtgaacccttaccctggcattcctgtcgacgctaacttctataaactgattcagagtggatttaaaatggagcagccattctatgccacagaagggatgtgagtacagccagaccggggttgggtatcaaacatttaccatatgctctaagtcctccaaatgcattgcaaaaacaaaagcttgctgggtttgttggtttgtttgtttcttctttctgttttgttttctttttgagccaaggttcccctgtgtagccctggctgtcctggaattgactctgtaaaccaggctggcctcaaactcagagatccagctgtctctgcctcctgagagctgttattaaaaatgggcaccgctgggctggtgagatggctcagtggttaagagcgcagactgctcttctgaaagcccctagttcaaatcccagcaactacatggtggctcacaaccaaacgtaatgaaaactgatgccctcttctggagtatctgaggacagctacagtgtacttacatataataaataaatacatttttaaaaatgtgcactgccaccacacctggttaaaacacactttcctacgacattgctgagatcttatttatttatatttatttattcatctatctatctatctatctatctatctatctatctatctatctaatgtatgtgagtatactgtcactatcttcagagataccagaaaagggcattggatcccactacagatggttgtgaaccaccatgtggttgctgggaattgaactcaggacctctggaagagcagtcttaaccacttaaccgctgagccatctctccggcccttgtttgctgtttaaaagcagagacatcttggtacagtggcatccacctttaattcccacagcgaggaagcagagaggcagtcagatctctgtgatttgaggccagcctggtcgacagccaaagctgtgtagtgagatcctgtcttgaaaaaaacaatcgccaatcaatcaataaattggggggggggggcaggaagggcaaggagacacttgcctataatcccagtactccagaggtatgaggctgtaggataatctgtgctaatagcaagacaagaaaggaaggaaggaaagaaggaaggaagggagggagggnnnnnnnnnnnnnnnnnnnnnnnnnnnnnnnnnnnnnnnnnnnnnnnnnnnnnnnnnnnnnnnnnnnnnnnnnnnnnnnnnnnnnnnnnnnnnnnnnnnnnnnnnnnnnnnnnnnnnnnnnnnnnnnnnnnnnnnnnnnnnnnnnnnnnnnnnnagggagggagggagggaggaagggagagagagagagagagagagagaaagagagagagagagaaaggaaggaaggaaggaaggaaggaaggaaggaaggaaggaaggaaggaaggaaggaaggaaaagaaagaaagaaagcttcaggtagcttgcgccctcttgggcagcctccaaggcttcattcttctgcttgtggtacctgaggatttgacttcacctcactctctggtgtggtaccaattctagtcttcccacaaagccagcagcgcacagtgcacagcccccaccccccacccccatgctgccctgggtgtgaactgtgggtggagccttgccaagttcattcacaccccctcagctctgctctgttttgctctctcacagatactttgtaatgcaatcctgctgggcttttgactcaaggaagcggccatccttccccaacctgacttcatttttaggatgtcagctggcagaggcagaagaagcggtacgtggaggcttggcttaatcataacggtccccagggagatgtgtgggtgtcacaccggcactaatggcctcagatccggtttaggccgaccatctttctcacctcactttgcctagattacccttccacagtcctgtgcagaagatgtactatctggtgtgggcttgggggcggggctttcctgtgatttcatccaagtgattaataggttaaaagctcttaagggtccagtgcaaagggctagacaactaaataaaccttaactcctccaggagccactggccttttctaagtcaacatggtgtgagggtgggtatggatgggaagggctttagcccaaagccctgaggacccattcagtctctgctgctcattccccactgatctgaacgatggcaagtttcttctttggcctcggtgttcccatctgtaaaatgggttgcaaaggtaaatgatcctcaagcagcaggatcttggtattacgtcattagcccctcctccttagcactcttagcacaggagaggtctgctccagataagggtggagccttgaacactcagagcccaggttcagatcctgcctccgtcactagtgtctcacatagtgactcacataatgtctcacattagtgactttaatgtcactaatgtctcacgtagcatttgcaactttagactttaatgtggacatcttgtgggatgatagttctgtaaaggacaaatcacctgccatctgcccttttcctactttttattaaaaatgagtggcgggctggtgagatggctcagtgggtaagaacacccgactgctcttccgaaggtccagagttcaaatcccagcaaccacatggtggctcacaaccatccgtaacgagatctgactccctcttctggagtgtctgaagacagctacagtgtacttacatataattaataaataaataaacaaataaataaatataaataaataaataaatagatttagtcttttaaaaaaaatgagtggctgctgtttcagaaaaaaacaaaacccatggaggggactggacagatggctcagtagttagagcactggctgctcttgcagaggatcagggttcacttcccagtaaacagggtagctcacagtcacctatacctcctattccaggagctccagcgccctcttctggccattgcaggcactgcattcaaatactgacacaggtgcacacttgcacacataaagtaaataaaacttcaaaacaagcctggaaactacccaaattcatagttttatatttttaagattattttacttttcaattacatgtagtagtgtttacagggaccctcagaaatcagaagagggtgtcgaatcccctggggctggagttacaagcaatcgtgagccacctcacatgggctcttagaaccaaactcaggtcctcttcaagagcagcaggtgttctaaccactgagccatctctccagcccctaaactcatacttcatgatctgtataaaagtaaggtgtatttaagtactgtgctttctaggcacacgggcgagtcctgctcagctggtcattcttgctgcttctccccctttccagatgtatcagaacatgggtggcaacgtcccagaacatccatccatctaccaaaacaggcggcccctcagcagagaggcgggctcagagccgccatcgccacaggcccaggtgaagattcacagagaaagaagttagcgaggaggccttggaccccgccaccctagcaggctgtagaccgcagagccaagattagcctcgcctctgaggaagcgccctacaggccgttgcttcgctggacttttctctagatgctgtctgccattactccaaagtgacttctataaaatcaaacctctcctcgcacaggcgggagagccaataatgagacttgttggtgagcccgcctacccnnnnnnnnnnnnnnnnnnnnnnnnnnnnnnnnnnnnnnnggaaagccatgtatctgaaatatagtatattcttgtaaatacgtgaaacaaaccaaacccgttttttgctaagggaaagctaaatatgatttttaaaaatctatgttttaaaatactatgtaactttttcatctatttagtgatatattttatggatggaaataaactttctactgtagaaatgttggttcttgttcctttgcgtgaactataagctcatggcctcatctgtatgtgagatttcctgtttttctgtttgtttgtttgtttgtttgtttttgtttctcttgagcaggtgcattcttgggggatgcttggtgttgtttggttttgagacaggatctagttatattgctcaggctagcctcaaacccgagatcttcctgcctctgcctcaagtcttggggttaacgtcatcacacccgacgaaggtcagctcttcaccaaagtgttaaagcatcctgagccgaccaggctgaggaccgcgggcaccacatctgatcggttctcccattccctcctcattcgcttctgatcttttgaaactgagcaagctccagcccacaggtttataaactcgccttgctttgtccctttgtacgctggacaccactgagttctgtcctttatttctttgttttgtcctatgacagggtctcatgtgtcccaggctggcctcaggttgactgtgtagccgaggatgacctggaccttctggtcctcgtgttcccacctcccgagtgctgggatcccggtgtgtgccaccatgcccggcttcgcctgattctttagctagcctctttgccatctaagtcagaggttctcaaccttcctaatgctgcgaccctttaatacagttcctcatgctgtggtgacccccaaccacgaaattattacattgctacttcataactgtaagtttgctactgttatgaatcgcaatgtaaataacctgatgtgcaatggctagggagtcacgatccacaggttgagaatgctgccctactgtgtctcttagctgctgcaagttccgtccccctaagcattgacttggcatgtggtatggtatggtgtcttgtaagcaccaggtctctccattgatccagcttccacccctctgcctctttgcttctttcaccccctagacactagctgcataatgttttctctctagccaaaaccgcctggatggtcctggatgtgtctgggcgtttcccagccccctcttctgcctcagtctctgtttccatgcccatcaagaatagctgcctccgtggcaacctgtgagatcttcttgtctatatcattaggttgtctctgcacagacagcctacctatgtgatgctgtaattagcttttgtgataatgtcctctctcttctctctttatttatttatttatttacttacttacttacttaatgtatttgagtacagtcattgtcttcagacacaccagaagagggcgtcagatctcattacagatggttgtgagtcaccatgtggatgctgggaactgaactcaggacctctggaagagcagtcagtgctcttaacccctaagccatctctccagcccatgtcctctcctttaagctggagtttgagccgtttgaaggcggatgtgatttaagtgaatccaaacactcagctccacggaggtaataggtataaacagacatttggttactttttagcctactcatgtaaaagcataagatatgcttgatggcaaacattcagctaatattgttttttatttaggtgagtggtggttagccatgtaacaagcgttggaacacctctccagctgagctccggttcaggtgtatctctcctaccttcctgtctgaatgtattcctaccacacacacatgagcatgcgcagacgcacacacatgagcatgcgcagacgcacatacatgagcatacgcagacgcacacacatgagcatgcgcgcgcgcacacacacacacacacacacacacacacacacacacgagtggcaaggcgggggtgcaggatgcaaatgggaaagaagtctttgtattagttaccttactgttgctatgataaaacagaccttggcttgctgcaggctcttgtttactgttaatattgctgctgagaacatggtatggaaattggaaatacccccccatctctctctgtctctgtctgtctgtctgtctgtctgtccgtctctctctctctctctaacacacacacacacactttttaaaatattttattttattctgagacaaaggtttttttgttttgttttgtttttgagacagagcttgtatagccctggctgtcctggaactcactctgtagatcccctgcctctgcctccagagtgctgagattaaaggtgtgccccaccaccacaaggttttttatgcaccccaagctggccttgaactcgaaatcctcctccttggcctgctgaggtcctgcactgcttcttcacattggccttcacagctgtctctgtcgcttacccctgagaatctaatgtggaacccaaggccaactctcagcctcccaggcacagccgagtggtttgccaacgttccttctctctctgttagctaccaatggtctttctcgctttctctgtcttctctgtcttgatggaattggaggaggcagaagagatacaggaatttgcaaagccccttgagctacttgtcgtgagatgtgtgttgatagagcaaggcagaatagtgatgtgagctacccaagcctcttccttctttcaaagtgattttgcccagggcatgtgcacattgtgtctgtgacatccctctggatggagccaaacacacagtcacatctggagtcatgtccttgtgtgcagcgttaaaaccctcaaaggacttcatttccacggaaatggatattctcttgtgggtttcgtaaaagtggttttatagccttaatactaccaaatgcttcttttaatagcataatattggggctggaaagacagttaatagtccatactgctattgcggaggacctgagttcaattcctagcactcacaactgggagatcacagcctctggcaactccagttctgagggatctgacgccctctactggcctccatgggcactgcatgcacgtagtgcatacacacactcaggcacatacacataaacataaaatacataaattattcttttaaaaagcataatattgacttgttcttcaaagatgtattcatgttatgcagtgatcatccctaatctgaaatactaaaacccagaatttgagcttgatgaacatccgcataatacgtcacacacacacacacacacacacacacagagagagagagagagagagagagaactcgatgcctggcctccagtgaacagacgttagaatgaagtgagttaaaattatcacatcaagttaccaccaggctgtgtacataaggcacacatgaaacattaactgatcctttaaattatatgtgcaaaattattccagtcatagcaagtttagtctggttcctgtcactccagccaaggggtactctacctgccttaccccaagctgacattgtccatattgctgatgtcctatgaaaacacactccttgaccaccatcttcaaactaaggacatttgaatatgcttctgggctgtgtcgggtagaggtttggagcatctccttcatagaaagtgaagtcagcagaggtggaaacttaagggctcgttggaaagtcagtggtgcgggaaggtgtttgctaaggcagacacgtgaaggaatatttagctgaagcagacacaggagaaaaggatgttctgctaaggcaagcatgtgatgaaggattctttgctaacaacacgcatgcgttagtccatcttacgttgtgtagctctatttgtccggaatctatagagagaaatgcaccaaaacaaaacaaaacaaaaaacaacttctggtggtgtattgtggcttcttgctgctcccaaggactccgattggcagagtaatgtcagctgagacagtcgcacaggatgaggcaagacctgtggaggacacgtgatgattggatggagtataagtagaactcaacagacagtcatggagactgagcttggcttgtttatagagctagctgtgcaatgcttgttgatctcttgtcttcaccagtcttcgattccccgagagaggcacagctaagaacttctcctgtgtccctctgggtccttcctgctgactctgctaggtaggttgtgccaccgctgctgattctgtttgctgtcccggctcttccaaactggactgctgatgtttctgtgaagtgtttgtgcgtggatcgagctgctgacctgtgaactgaactgctaatttccagacagcacagaccggagttgctctaaagaacctttctaaacaggtccactttccccgtatcctccccccccccccacttcctctggtgggtggtggactaaaagggaggttaaagcatttaaaagccatcattaaaaataaggattggcagagccgcactcaggcactgcagcgcagctcaggtctgcaccaggcgcgcgaaggtgagccagagccaagatggctgtcctttctaaggaatatggatttgtgcttctcactggtgctgccagctttgatatggtgctccacctagccatcaacgtgggcaaagcctgcaagaaggacaaggtagagtaccctgtcacctacagcatggatcctgaaagtgggcatatgttcagctgcattcagcgcgcccaccagaacgtgttggaggtacaccctccctccctgtttttcctaacggtgggaggtgttaactacccccgtatagcttctggcctgggcttggccttgatttcttggacgagttctttacacatatggagaccctagcaagcggtatcgaggagccacggggctctcttgccctctttactctgatgggcaccgccatgtgctctgcttcccagcatcctctgcttcccagcatcttggctggatcagaccgggcttaagctgcgggtccagatcctgccactgaggaaaggggggccgggggggggcttcctattctcatttgcctcctacgactcatcctgatttccagttccactgtttagtttttgttgttgttttaaatataataaaaacttacctgacatcagcctcatacctaaaaatgaagaaataaaaataaaaataaggattgaaaaagttaaggttacagttaggatcacaaagcatgcccctgttcactttagtgtgggccaagctgtgtccctgaggggagggtacccctctttttctttccctttcttccttcctttctgtctcttttcttccttccttcctttctcttttaaaaatgtatttattttatttgtatgggtgctctatcagtacctgcgtgacagaagagggcatcagatgccattacagatagttgtgaaccaccatgtggttgctgggaattgaactcggggcctctggaagagcagtgtactggctggttttgtgtcaacttgatacagctggagttatcacagagaaaggagcttcagttgaggaaatgcctccatgagatccagctgtaaggcattttctcaattagtgatcaaggtgggggagggccctttgtgggtggtgccatccctgggctggtggtcttgggttctataagagagcaggctgaaagccgggcgtggtggcgcacgcctttaatcccagcacttgggaggcagaggcaggtggatttctgagttcgaggccagcctggtctannnnnnnnnnnnnnnnnnnngagggccctttgtgggtggtgccatccctgggctggtggtcttgggttctataagagagcaggctgagcaaaccaggggaagcaagccagtaagtaacatccctccatggcctctgcatcagctcctgtttcctgacctgcttgagttccagtcctgacttcctttgttgatgaacagcagtgtggaagtgtaagctgaataaaccctttcctccccaacttgcttcttggtcatgatgttttgtgcaggaatagaaaccatggactaagacaaacagctggtgatccatctctccagaccttcttttctttcttaggaaaagtttattgactataccacaagaggcagcctgctgggccataactagggtactacttgccatgtcttccctttaaaaaaattttttttcagaaatttgaaatctacccccctttctttcccttctaactccccctatgcttcccacaactgcttatcaagttcatgactaacatcttccataattactgttttacacacacacacacacacacacacacacacacacacacacaccctagtgggcccatttagtgttgttcttgtgatcatgtcgttagggctgacactcgggattggatagcctaacacggggctctccaccgaatgccgattctctctctctcagcctcgattgcctttacacatggtcatcatgcagagactaggtgactgtggcatgctcagccccaactggtaagtctacaatgcaatccctacactcaaagcccagggaacatcaggactgaggctgtggaaagattttaagagtaggatgtaggggtggggttagaggaatggtgagagaggtcatgtgaggggagcctgtgattgggatgtagagtgaataattagaactgtctgtaacagacacacattcaggcaagacaccaatgcacataaaagaataaatcattaaaaaataataaatacgccgggcggtggtggtgcccgcctttaatcccagcacttgggaggcagaggcaggccgatttctgagtccgaggccagcctggtctacaaagtgaattccaggacagccagggctatacagagaaaccctgtcttgaacaacaacaacaacaacaacaacaacaacaacaacaataacatggggggggggggagccagagacgaccagaatgtctgctgctagatagtgccttttagacaggaatagggaagtctcaccggtctaatctcaccaacatagttgtccagacctgtataatgacatcaccggctgacatgccaatacggatggggaaaactttacaaggtttcaccccctttaacatcctttagcctgtaggctaaggccaccccttcaagcagtgctttatagtgattgtaccagcagggggcgcccgagcaccacagtttccgaaacagagtgtcaaacaccaggtttgacttgttactgccccttggtacctagaagggcaaatattgggcgaaaggaaaacaaggcgtctttggggagaatttgtccagggtgcaatcgtttctggactcgcgataatgagcgcttttcgtgcttgttcctagtcccacactgagttctnnnnnnnnnnnnnnnnnnnntgtgtgtgtgtgtgtgtgtgtgtgtgtgtgtgtgtgtgtaaaacagtaattatggaagatgttagtcatgaacttgataagcagttgtgggaagcatagggggagttagaagggaaagaaaggggggtagatttcaaatttctgaaaaaaaatttttttaaagggaagacatggcaagtagtaccctagttatggcccagcaggttgcctctccatcccccaccccacccctaccccgtgaagaacaccaccagtaacagccttagataaactgctgctgtgataaaacacttaccaaaaacaatctagggaaggcaaaggtttgtttcagtttatagtttataggctgttgttgaaagaatccaagccaagaactcaaggtgagaacctggaaggcagattcaaccctctcttcttgggcacaaacacacacacacacacacacacacacacacacacacacgcttgtacacatacaaaatacacctaattaaaaaaatatttttttaaacgagagaagatagcacactccaccagaggcaccttaccctgttctgtttacactaattaagtctatgtggtgttaagcatttagagttcaaagaaagattaaaacgcagtgcctgtgctctagagcaacagcaaggacagatgaggtgcttgtgagttaccgtgtgggtgctggggacagaaccagggttgtccctgaggacactgtcctggtaatccaggcaggtcacagggccacctgtttggtctgcatgtggtacacagattacatgcaggtaaaagcatacgtgcacacagacaagatggtaatggcaccaagtgtctgtctcattacatacggccaccgccgccacctcttgttatggcaatgcctcgggtggaatcattctttctgcagaagtctctgctctcctgatcatagccttaagcggaggtggcggatagctcagtattcgggtgctcctcgagcatgcgtgagaccctgggttctgtctccagcacacatattacccctaccaccaacaaaacagttaaacctgtgtttctcatcgcaggaccgttctggataagctcctcccagagatatttaaaccagggtcagctgcccttgcacagggccagcatgtgtgttcagcaaacacaacccatgaggaggaattagctcactcgctcgatgagagcggaccacaggcagggcagaacactgcctccagtccaggatcagccatggacatggtgaaggtcaattccatggacttcggagaatttgtggatgtgtttgggaacattgttgagaaatgccctctgattgccgctgctgtctggtcccagcgtccattctctggcttggaagacttagaaaatcacttttttgcctttattgatgctctcccgagatcaggtaagacttcaggaccgtgtgcgcgaagtcattttcaatattgtatataaaaatattttagattactttagcctccttactcagttatttagccgggattattagaaggatcagtagacatcctttcaaacgctagtctcttgaaggtggacacaagaacatgggggcgggatgggcaaggtagcatggatggccgaggacagcggaggcagagggaggacaatctctgaggtcgagaccagcctgatctagagcgagttccaggacggccagggctattggaggtcaagaatgggaacagggcaaaggccttggtgactcagaagctgaaggcccactttggcaatgccctggatgaaagagaggatagcgaggacctcccagggaccccagagaggaacgggaagcgctgagcgattttcaaaaaaaaagggccggtttggaccagacaaggatgcattcatttagatcccaagactctttgcagagagaagtaaaatgggagcaaagcaatgttttctggggagagtgggccacagggtggggagaagagggggtagaggtttattcaggatggcacagcggccgaaggtccaaaggtacatagtccctgttcataggctactatgggttctgagaataaacccgacatgcccttggggaacaaagtcagagggtaggagtcacctgcccttgagactgttcttagtcttcggtcaggagggtggtctcaggacagagcaggcactcgcagctgcgttcagtatggctgtgacactctgtggattctcagactcctctgtatggctgcctatgagaacttacagaggaagagcacaggtccaggttataaaatcaagctgaggactggagagatggctcagcagttaggagcactggctgctcttccagtggactggagatcaattttaagcacacattccccaccccccaaagatgctcgcaaaggcgtctaactccaggatctggtgtcctgctctggcctccgtaaacaccaaggacacatgtgatgtgcagacatacatgcaaacaaaacactcaaatatgtgaaatttaagtgtgtgtgtgtgtgtgtgtgtgtgtgtgtgtgtgtctatctgtctgtctatctgtatgtatgtttgcaaatcaactaatcaactcagggtctttcttgcttatcctgggcactctaccactaagatgtactcaatctttttcacaatgtttctagaacagagagagagagaagaggagaggagaggagaggagaggagaggagaggagaggagaggagaggagaggagaggagaggagagga

SEQ ID NO: 68 - DNA, 3401 bp, Mus musculus
gcggcctggctaccgcgcgctccggaggccatgcgggcgttggcgcagcgcagcgaccggcggctgctgctgcttgttgttttgtcagtaatgattcttgagaccgttacaaaccaagacctgcctgtgatcaagtgtgttttaatcagtcatgagaacaatggctcatcagcgggaaagccatcatcgtaccgaatggtgcgaggatccccagaagacctccagtgtaccccgaggcgccagagtgaagggacagtatatgaagcggccaccgtggaggtggccgagtctgggtccatcaccctgcaagtgcagctcgccaccccaggggacctttcctgcctctgggtctttaagcacagctccctgggctgccagccgcactttgatttacaaaacagaggaatcgtttccatggccatcttgaacgtgacagagacccaggcaggagaatacctactccatattcagagcgaagccgccaactacacagtactgttcacagtgaatgtaagagatacacagctgtatgtgctaaggagaccttactttaggaagatggaaaaccaggatgcactgctctgcatctccgagggtgttccggagcccactgtggagtgggtgctctgcagctcccacagggaaagctgtaaagaagaaggccctgctgttgtcagaaaggaggaaaaggtacttcatgagttgttcggaacagacatcagatgctgtgctagaaatgcactgggccgcgaatgcaccaagctgttcaccatagatctaaaccaggctcctcagagcacactgccccagttattcctgaaagtgggggaacccttgtggatcaggtgtaaggccatccatgtgaaccatggattcgggctcacctgggagctggaagacaaagccctggaggagggcagctactttgagatgagtacctactccacaaacaggaccatgattcggattctcttggcctttgtgtcttccgtgggaaggaacgacaccggatattacacctgctcttcctcaaagcaccccagccagtcagcgttggtgaccatcctagaaaaagggtttataaacgctaccagctcgcaagaagagtatgaaattgacccgtacgaaaagttctgcttctcagtcaggtttaaagcgtacccacgaatccgatgcacgtggatcttctctcaagcctcatttccttgtgaacagagaggcctggaggatgggtacagcatatctaaattttgcgatcataagaacaagccaggagagtacatattctatgcagaaaatgatgacgcccagttcaccaaaatgttcacgctgaatataagaaagaaacctcaagtgctagcaaatgcctcagccagccaggcgtcctgttcctctgatggctacccgctaccctcttggacctggaagaagtgttcggacaaatctcccaattgcacggaggaaatcccagaaggagtttggaataaaaaggctaacagaaaagtgtttggccagtgggtgtcgagcagtactctaaatatgagtgaggccgggaaagggcttctggtcaaatgctgtgcgtacaattctatgggcacgtcttgcgaaaccatctttttaaactcaccaggccccttccctttcatccaagacaacatctccttctatgcgaccattgggctctgtctccccttcattgttgttctcattgtgttgatctgccacaaatacaaaaagcaatttaggtacgagagtcagctgcagatgatccaggtgactggccccctggataacgagtacttctacgttgacttcagggactatgaatatgaccttaagtgggagttcccgagagagaacttagagtttgggaaggtcctggggtctggcgctttcgggagggtgatgaacgccacggcctatggcattagtaaaacgggagtctcaattcaggtggcggtgaagatgctaaaagagaaagctgacagctgtgaaaaagaagctctcatgtcggagctcaaaatgatgacccacctgggacaccatgacaacatcgtgaatctgctgggggcatgcacactgtcagggccagtgtacttgatttttgaatattgttgctatggtgacctcctcaactacctaagaagtaaaagagagaagtttcacaggacatggacagagatttttaaggaacataatttcagtttttaccctactttccaggcacattcaaattccagcatgcctggttcacgagaagttcagttacacccgcccttggatcagctctcagggttcaatgggaattcaattcattctgaagatgagattgaatatgaaaaccagaagaggctggcagaagaagaggaggaagatttgaacgtgctgacgtttgaagacctcctttgctttgcgtaccaagtggccaaaggcatggaattcctggagttcaagtcgtgtgtccacagagacctggcagccaggaatgtgttggtcacccacgggaaggtggtgaagatctgtgactttggactggcccgagacatcctgagcgactccagctacgtcgtcaggggcaacgcacggctgccggtgaagtggatggcacccgagagcttatttgaagggatctacacaatcaagagtgacgtctggtcctacggcatccttctctgggagatattttcactgggtgtgaacccttaccctggcattcctgtcgacgctaacttctataaactgattcagagtggatttaaaatggagcagccattctatgccacagaagggatatactttgtaatgcaatcctgctgggcttttgactcaaggaagcggccatccttccccaacctgacttcatttttaggatgtcagctggcagaggcagaagaagcggtaccagaacatccatccatctaccaaaacaggcggcccctcagcagagaggcgggctcagagccgccatcgccacaggcccaggtgaagattcacagagaaagaagttagcgaggaggccttggaccccgccaccctagcaggctgtagaccgcagagccaagattagcctcgcctctgaggaagcgccctacaggccgttgcttcgctggacttttctctagatgctgtctgccattactccaaagtgacttctataaaatcaaacctctcctcgcacaggcgggagagccaataatgagacttgttggtgagcccgcctacccggaaagccatgtatctgaaatatagtatattcttgtaaatacgtgaaacaaaccaaacccgttttttgctaagggaaagctaaatatgatttttaaaaatctatgttttaaaatactatgtaactttttcatctatttagtgatatattttatggatggaaataaactttctactgt

SEQ ID NO: 69 - protein, 996 aa, Mus musculus
AAWLPRAPEAMRAQRSDRRLLLLVVLSVMITVTNQDLPVIKCVLISHENNGSSAGKPSSYRMVRGSPEDLQCTPRRQSEGTVYEAATVEVAESGSITLQVQLATPGDLSCLWVFKHSSLGCQPHFDLQNRGIVSMAILNVTETQAGEYLLHIQSEAANYTVLFTVNVRDTQLYVLRRPYFRKMENQDALLCISEGVPEPTVEWVLCSSHRESCKEEGPAVVRKEEKVLHELFGTDIRCCARNALGRECTKLFTIDLNQAPQSTLPQLFLKVGEPLWIRCKAIHVNHGFGLTWELEDKALEEGSYFEMSTYSTNRTMIRILLAFVSSVGRNDTGYYTCSSSKHPSQSALVTIKGFINATSSQEEYEIDPYEKFCFSVRFKAYPRIRCTWIFSQASFPCEQRGLEDGYSISKFCDHKNKPGEYIFYAENDDAQFTKMFTLNIRKKPQVLANASASQASCSSDGYPLPSWTWKKCSDKSPNCTEEIPEGVWNKKANRKVFGQWVSSSTLNMSEAGKGLLVKCCAYNSMGTSCETIFLNSPGPFPFIQDNISFYATIGLCLPFIVVLIVLICHKYKKQFRYESQLQMIQVTGPLDNEYFYVDFRDYEYDLKWEFPRENLEFGKVLGSGAFGRVMNATAYGISKTGVSIQVAVKMLKEKADSCEKEALMSELKMMTHLGHHDNIVNLLGACTLSGPVYLIFEYCCYGDLLNYLRSKREKFHRTWTEIFKEHNFSFYPTFQAHSNSSMPGSREVQLHPPLDQLSGFNGNSIHSEDEIEYENQKRLAEEEEEDLNVLTFEDLLCFAYQVAKGMEFLEFKSCVHRDLAARNVLVTHGKVVKICDFGLARDILSDSSYVVRGNARLPVKWMAPESLFEGIYTIKSDVWSYGILLWEIFSLGVNPYPGIPVDANFYKLIQSGFKMEQPFYATEGIYFVMQSCWAFDSRKRPSFPNLTSFLGCQLAEAEEAVPEHPSIYQNRRPLSREAGSEPPSPQAQVKIHRERS

SEQ ID NO: 70 - DNA, 117730 bp, Homo sapiens
gctgcagtgagctatgatcatacctctccacttcggcatgttggataatgtgagaccctatctcaaaaaaacaaaatttttttttagaaacttgtcaatatcctctggtggaaaaaccaacaacaacaacaaaacaaaaataaaataaataagataaaattaaaagaagaaactcgtcaataaattcaccagtcatgcaatgaatattcattgatttatgagagcatgctgggtactagtcgttgtgttaaggtctaggaatgcaagtgtgagtaacagttgggggatgaggttcaggcaacagttggacaaacatagaggctaagaactgtagtacagtgggacagacagaggagagaaacaagaggatgtacctgagtcacatgtggctggggggatagcgatagagtagtcaggaatgaatctagaaggtgaatcagagttggtcacatagactggaaggggcaagggaaatagtgagaaaggggcatgggtcattgcagataccaacacaggtatcaagacatggaaacaagaagaacataatgaatttggagttctggttcactgtgactctaacttgggtttatgtggaggagtggtggctatgcaaacagggtacaaagtaagctattgttacagacagcccccaagcaccatggattaaatgagaccgaagtttatttctcttaagcagcagtctagagggatgtaggtagtacaggttttggagttgctcatgcaaatctaatgccttctatattgttgttccaccataccctaggctgttgttcatgtacgtattgtcaaaatgggattactgtgacatccatgtcccagctcaagggaagaaaaagcatatttggaaaaagcctagtgtgatcagagagtgtagtacagtcatgtgctgcataacaacattttggtcaagatggacaatgatccaaaagattatagttctggttttctactgtactttttctatatttcaatatgttcagatatacaaatacttactattgtgttacaactgcctacagtattcagtataatacatgccatataagtttgtagcctagaagcaacaggccataccacatagcctgggtatgcagtaggctaatatctaggtttgtgtaagtacactctgatgtttatgcaacaatgaaattgcctagcaatccatttctcagaacctgtcctattaagtgacacacaactatatttataaaatgccatgtaagtccaaaaagaagatgttttgtctgcttgtaggatataaattctacataaatgtgttcactctttccttgttaattactttgttcaaaccccttatgtccttagttatttttgacagtgtaaaatgggccaactcgccttaccacagatacctccatctttgtaacttgtcttctttccatgaactccctcttttggctttctggatcatccatctctcctgcttcaaagtttaggctgctattagacttctttggaatgggaaaaatacctaacctatgggattgttattagtattaagtgaagcaaagattgtaaagtgattggtataatgtttggcacattttaggaactcaaatggtggcaattattattctaagccataatggctgaaagcaggggttttggatatgagccaatttgaattctaatcacattcagcctcttactggctgtgagactttaggtaggtcacctaacagctctgagccttagatttctgatggagaaatcagttccatctcactaataaggccatgagtcagagataatcagtttgcattttagtgtattatcttctagttatttgagtaggcatatacataatttctgaaaatttaatgactgtcatgtcatgtagtttgtacccttttttaaccttaaactctttgaaagcaaaattttcaacagctcccatttttgtgttgacttctaaaagttacccatgctcaatattttttgtaaaagtaaaatatcaaattgaaatctacttaatatatcaattaacaagcaatctataggtgaagcaaatgaattaatttctattgattttgaaatctatccgttaagggctgaattgtgtcccttaacaggacacaatttttttgtggtcctaaaaaacgtatttttgaggtcctaaccccatattcctcagaatgtgaccttatttggagataggctttttacagaggtaatcaagttacactgaggtcattgggtgggtcctaatccaatatgaccggtatccttatgaaaaggggaaattcaaatgcagcgctagacagacacacacacagggagactgccacgtgaacatgaaggcagaggtcggggtgatgtagcagaagccaaggagcaccaaatattgcctgcaaaccaccagaagccagtacaaggcttggaacagattctccatgacagcccttagaaccaaccctgccaacaccttgatcttggacttctggcctccagaactgtgtctgtggtactttgttatggcagctccagcaaactaatacattatctgttgcgaataattctaaggagatgattattttgaaatcatcttagacataaaggaagaactatcaattatgaaattctgcagttggaattttgcagtttacctgtgtgccaccaattgcataatggaaacagattccagggtcctgttattgttcatcccatttagatgggttaataaaaacacagtaaagagcagctcatgagttctaagcaggggtagtcatcttccacacattcaggataagttaacttgtccaatatttcaaatctttttttttcccttggaagaaaatgactttattctaattaactcacaaagaataaaatcataacagctcttttaaggaggccacacaaacatttgcccagccccaaattctacagagtaggaacacccccttccatttcaattcagaagcaaggaagctaggaatgacacaagaggtttaactgatggttacactttataccttcactatcaatttgatttttatactaaattaacttggttatagagctgattttccatttctccaggttgaacttcttgatcaggccaatcgttttgccagtcggcactgtttcagcacctcattgaaaccctcacagagcttgatgtcaccatggttctgggcacactccagaaactgttcgatctcatagaagcaaggctgctgctgctgtgccagctgggttccctgaggctcctggtaagtgatgtcaggcctcgcaggctcagcattacttcctccactaaaccccccagtaatggcgtgacccagtgtgtgccccacggcagagcccacagccgcgccagctgcagtggttgccatttgggccatcagacggggcacagcagcaggagagccaactgcagatgggggtgccgctgctggtggctgagcggctagtgctggcctggatgcaactctcatctgaggggcccagctggctagaggggtcacgcgggaggtgcagcttcagcttccacatggcatcctaggtacgcaacggctcggccttttcttcaaatcttttttattcaaaaccttttattatagaaaatgtctaataaaaagtataatgaacttatatgactgtggctgaggtgcaactactggtgacacatggttaattttgattgctccactcaaaccctccacatcagatgattttgaagaaaatctctggctttatgtcattttttacagcttcactgagatccaatttacatgtctatagttcacctatttagcctacaattcagtggtttttagtgtatttacagagttgagcaaccatcaccataatctaattttacaatagtttcatcatccgaaaaaaagaaaccctgttcccattaactgtcactccttattccccctcaaccttcccatttcatatcattttttctgtaactatttcatgtgtacctctgcaaagataggaatgatttttaaaatatataacaatgctatcatcacacataattttttttttttttaatggagacagagtctctctctgtcccccaggctggagtgcagtggcgcaatctcggctcactgcaacctccgcctcctggggttcaagcaattctcctacctcagcctcccacacacatataattttttataaaataatatcaaaattaaaaccagtgatcacattttcccaattattttatgtatatttttcgggttacttgaatcagcatccaaataacatctttacattgcacattacaattgcttgatattgtaatgtccttaatatatcttaggtttcttttaatttataggctccatctctttttttattttcttacaaattttcgttgaagaaaccaagatatttgttccatacagtttcctaggttctggaattttattttatttattatttatttatttatttatttatatttttttgagatggagtcttgctgtgtcacccaggctggagtgcaatggtaccatctgggctcactgcaacctccaccttctgggttcaagcgatcctcctgtctcagcctcctgagtagctgggattacaggcggccgccaccatgcccagcttatttttgtatttttagtagagacagggtttcactatgttggccaggctggtcttgaactcctgacctcaagtgatccgcccccctcagcctcccaaagtgctgggattacaggtgtgagccactgcacctggcctttggaattttaaaattatgtccctgtgttgtcccatattccactatcccatgtatttcctataaattggtagttggatctgggatcttcaggtgtgcgccaccaggccctggaatcttaatcagattcaaatatcatttgtttgtataagaatacttgtaggtgaaaatgtgtcaaacttatttatttatttttaattattattttttagagacaagatcttgctctgttgctcaagctgaagtgcagtgacacaatcgcagctcactgcagcctcaagtttctgggttcaaacaatcctcctgactcagcctcctgaatagctgggactacaggtgtgagccacatacccggctaattttaattttttttttctagaagtggggtctcattttattgcccagggtggtctgtaacttctaggctcagtgatcctcttatctcagcctcccgaagtgctgggattataggtgtgagccactgtgactggcctcaaacttctttaattttcctttttttttttgagttggagtcttgctctgtcgcccaggctagagtgcaatggcaccatctcggctcactgcaacctccgcctcctgggttcaagtgattctcctgcctcagcctccctcccaagtagctgggattacaggtgcgtgccactgtgcccggctaatttttgtacttttagtagagacggggtttcaccatgttggccaggctggtctcaaactcctgacctgtgatccgcccgcctcggcctcccaaaatactgtgattacaggcatgagccaccgcacccggcctttaattttcttttgttgtgaaatacatcatattcacagcagtgtgtaaaaataattacatagtttaaagaataacaataaaatgaacatccagcacccaccacagaggttaaaaaaaaaatagggtgtggttggacatggtggtccacacctgtagtcccagctacccagaggcttgagcccaggagttcaaggctgcagtgagctatggtcgtgcctgtgaatagccattacactccagcttgggcagtgtagcaagaccctatcgcaaaacaacaatagggtatgttagcacctcagaaatccccagtttgtcttctctaattaaacctcctcttcccaccccataccagacgtaaccacaatcctgacttttgtggtaattattcctttactttccttatacccctatgaatgtattcctaaggagaatattgtttgcttccgcctttatgtctattattccatgacttgcttttccccctcaacattatgtttttgagattcattcatggtgtgtcaggtaactgtagctcattcatttacactgttatttaatatataggtattttattatgactgtactgcaatttatccttttgttggtgggcatttagattgttcccaattttttgatattataaacaataatgctatgaacattcttatacttgtctcttggcacatatgtgtttctttgaggtttatatctgggggtgaaactgctggctggaggatatgttcaactttagtaagatatgccaaattatttttcaaagtgctcacacccattgggatgtccaccaacagtgtgtgggtgttctccattgctctgaattcttgtcaacactttgtattgtcagattttgccaattggtgagttcaaagcccctattaataaaagatgtgtaaaattatactataaagttgatatctcaactgaactcacatgaaccctattcaaatattccttttgtttgtccctgattttcaggaaaacataaggctttgtaagttaaaaatgacatgaaagtatttcacctgtgagctgctacgaaactatgtcacaatttttggagagagagaggaaagggagaggagatatttgtgtgacttaaggggtggaaacatggtatcaagatgctggtaagatagatgaccacttactcatggctaagcatcatggtgctaagaatctagataaaatacatcctttcgtagagttagcactagacactccattcaacccagaaacaaacttactcttctcttttccgatttcccgtttcagctcatttcttctagttgcttttgaccctttaagagtttctttattacagaattcctatcatgaactctgacaccaaaatttcatacttgggcatgcatacctgggcgtgtaatccaggactctagacaatttcaggctactttccttaagtgttgctgtgaggaagaaattagttctcatattagatatgactcttggcacatcacagaaaaacatgggcattacttcaccttctgttagcctatacctcatactccaaaatatttcagtctataagatttgctccttctagaattattttttccaccaatttccacggaaaatcaagtgttcctagaaaccattcctggctggccgcggtgactcacacctgtaatcccagcactttgggagtccaaggagggtggatcacgaggtcaggagtttgagaccagcctggccaagatggtgaaacccttctctactaaaaatacaaaattagctgggcgcagtggcgggtgcctgtaatcccagctactcaggtggctgaggctggagaatcgcttgaacccgggaggcggaggttgtagtgagcctagatcgtgccactgcactctagcctgggcgacagagcaagactctgtctcaaaaaaagaaaccattcctaacttctcctctctcaccaaccccctttttcatgaagatctctgccttgtgtccaagattcttggacaaagcagcagtatctttatgattttgtatcctgaatactgctgcactcaagctgatgttctgcaaatttgtaataatcagtttcattttttttttagtttttcattttatttatttatttttttgagacggaatctccctctgtcgcccaggctggagtgtagtggcgcgatcttggctcactgcaacctccgctccccaagtttaagcaattctctgcctcagcctcctgagtagctgggattacaggcgtatgccaccacgcctggctaattttttgtatttttagtagagacaggtttcaccatctttgccaggctggtcttgaactcctgacctcgtgatccacctgccttagcttcccaaagtgctgggattacaggcatgagccactacgcccggcgaagaccaagtcttgctctgttgcccaggctggagtgcagtggcatgatctcagttcactgcaacatctgcttcctgggttcaagcaattcccctgcctcagcctcccaagtagctacgactacagtgccaccatgcccagctaatttttgtatttttgttagagatggggtttcaccatgttggtcaggctggtctccaactcctgacctcaaatgatccacccgctttggcctcccaaagcgctgggattgcaggcatgagccacagcgcccagccaatcagtttcctttaagacagtaattgagctttaaatagaaggtagtgtgttaggtcttggccattggaagctcgcttttctccccataaccagcctgtttcattgctttatctcctcatgtttcacttatttcaggccatcttccttcacttctgtttctgacctaaggtagacacaacactctttaaaaaaatttttaaacccccagcagctacacaaaaacttaaaaaatttaaaattgaggtaaaatacacatacataaaatttaccatcttaactttttgtttttgtttttgtttttgagacagagtctcactctgtcacccaggctggagtgcagtggtgtgatctcagctcactgcagcctctgcctcccgggttccagtgattctcctgcctcaacctcccaggtagctgggattacaggcatgcgccactacgcctggctaattgttgcatttttgtagagatggggtttcaccatgttggctaggctggtctcgaactgctgacctcaggtgatctgcccacctcggcctcccaaagtgctaggattacaggcatgagccaccgcacccagccttagccatttttaagtgtacagtttagtagcgttaagtacattcacattgttgtgcaaccagtctccagaactctgctcatcttgcaaaactgaaactctgtatccattaaacactggctccccatttccccctgcccccagcccatggtaaccaccatttaactttctgtctttatgaatttgtaatgggatacagtattgtattttttgggactagcttatttcacttagcataatgtcaagattcatccatattttagctgtatcagaatttccctcctctttaaagctgaaaaatactcagtcgtatgtatatactgcatttttgtttatcattcatctgttgtggacatgggttacttctgccttttgactactgtgaataatgctgctttcaacacgggtgtacagacatctcttcaagaccctgctttcaattcttttggctacatggccagaaatggaattgttggaccgtattttttttaattttttgagaaacctctatagtgttttccatagtggctgcaccatggtagacacttctaaagtttctgccataccctaggggaaagaattattgtactgtagacaacatctaaggaaaagaactgtatggccaagagtaaacagtcaattttcatgctttattagaaaataattaaaataattaagagcgtggaattcctagaattgggagagacattatgaaccatttggtccatccctttcctttacgatgagtaaacagaggtttgtggaggtcaaacggctagttaagtaagggaagaaccagaactggcatccagagctttccaatcctcaacttattgcaaagaaaataataataattttcaactcgaaaaattatgcgatgaagaacaagaactattgagcggatgattcgcaacatcctctgggatgtattttctgtgtgttttgttttgaaggctgtttgttaacctccctaattgccttggttgacattgaaaccctgcctgtttttcttgatcccgccgctgactgggtcctgagcatcctaggagatggaggcagagacaaaggaaatcagtccacaattaagaatggaatggttcttaatggaatgctcgcctgtgcgctggcgggagttgccagcgtgccgagcggattcagcgcctttctcagggcctcaaagatcccagcgcactaggagggtggtttgtggctccctgcagtccccacgccccggatccaaacgacagagttcggggactcacaggggcagcaaggcggcagagccgcggagccagtgcaacttctccggcgggaccgcgcccaatcttccccgccgcagtcggggagccccgggggccgccgagcacaggctgcggaccgcggcgggcacgtgggctcggctgcagcgctgcgccaggcaccggctgctcggctctgcccaacctctccgctcccgcctcggtccctgcctctggggagagggttcctccccccttccactttgcaccagtccgagggaatttgcggtcggtgacgcgcatccttaagagagccacctgcagcgcgaggcgcgccgctccaggcggcatcgcagggctgggccggcgcggcctggggaccccgggctccggaggccatgccggcgttggcgcgcgacggcggccagctgccgctgctcggtaaggccccgctcgctcgctcgcagcccctcgcggtccctcagcccccaccccgcagtgtggacccgggcgcgcgcctcctccggcccagccgcctcgctcctccccgcgctcgctccttccattgcctcccgcgcccctcccctctttcgcgccctccggactcgcccactacttgcctgcggccccggcgtttcccaccccgcgtcctcttccctcttctccgaagtctctcctctggctcgggccgcggtcccgagtggcggcccggacttcgcagacggcctcgccgaggcgctgcgccgggtctggggcagctcggcccgcgcgctcgggtgctgggccgtccgtgggagtctgcggccgcgaactcggcgccaggtggccaaggacctctcctggcccggcccttggatactgtagacacctgggtgtcgtctttaactcttcttttgaggttttgatttatggagggaactctgatgggaaaatgcgtccgcgttctcccctagagcgagtcatcctcaataacgataccccccagccccgccgaattttggttggatcaacgaatagtttacctaggaaatattatgcaaacagatttacatattaaaatactagctgtccctttcttctagtctcttcttatcctggcataaaccccaaaggggttttcaaggactccgaggactgtccccaaagaatctgctgggtagcatagttgttattgaaaaaaaaaatcttcccatcggttcgcgtcagctttctatttggaaagatgagaggactgaatcgaatttgggttgaaggcgacagagttctgggtgcccggcagctccggtccctgtcctaggtctgcaaccttgggactgacactcacctcccccggcctccgcgtcctcatctgtgcagtgagggagtccgtccgagtccccttcagctctgaaatgctaggacttgaagtctctgtggtaaatagagaaaatgcttgcaatatagaagtgcaggaattatatccaatagcttttgttacaaataattctgaaatataaaaagtaaaaaatggaaatcgggggaaaagagttgaaaaacaaagacattttagttcttaaatagttatctttactagttagtaaatctgtaatttcaaatgtgtagtacaatatgttttccagattccgttaatacaaaatgttagctttctattatgtatgatattaagtagtaagtgcatttttcagaagcataatgggctttctaaaggtataagcatcaatacttgcaacgatatttaagctgcatggaattcttttctatttaggaaagaattcagaaatttctatgtctctctctccagatatttctaaatgaagtataattggcacacagtaaatatgcacacatcttaagagtacaatttcattagttttcacatatgtacgtgcccaaataaccacgatcagactgagatatagagcaattctagctccaccctctctgtcagtaccccctccccaggtagccactattctgacttctgatgccatggattgcttttgcctatgtttgaacttcatgtaaaccaaaccatcatcgtgtgctcttttatgtccaccttcttttactcaacattataataataagattcaaccttgttctctgtagcagtgtttttttttttaattgctggtaccattccgtggtatgaatagatcttataatttattttatccattatgttcacgaagcacatggaagttgttccaattttgtgtaattatgcatagcactgctgtgaacattgttttatatatggtggacataaacaccagtataaaggattatgcccacaagtagaattcctggatcatagggaagggatatgttcaggtttggtagataccgtcaaacggttttccacagtggttacaccaatttccactcccactagcagtgtatggcagttccagttcctcacatctttgccaatactttgtattatggattttcttgaataaagaaggataaagtgagaagcttaaacatgagaactttaaaatggttaatagccttaaattctttgaattagaacatgggatcccaatttcccttatattgtaaacactacttttttttttttttttttttttgagacggagtcttgctctgtcacccaggctggagtgtagtggcgcgatctcagctcactgcaacctccgcctcccaggttcaagcgattctcctgcctcagcctcctgagtagctgggattacaggtgcgtgccaccgcacccagctaatttttgtatttttagtagagacgaggtttcaccatgttggccaggctggtctcgaactcctgaccttaggcgatccacccacctcagcctcccaaagcgctgggattacaggtatgagccaccacacccggccatgcccagacttctattcatcatttatgaataatgatgaagctttctaagtggcatttgaaggagaggaacatgttcccaatgggcttttctgcattatctgctgatactggacagagagaagtatttcaatattttaagagctatgatactacctttttcattagtgttaaaaaaaattcgtattcaaagccttgaactgcacatttgagttgccattctttgctcttgttgcttatcttagtttatttgccttcttggaaactcctagcccaagggggaatgattcaggagaaagtggagggaagggacactcagcaaagcttggtttggattggatgtgagcccagacctgccgacctgacattaatgtcccctctgactctgaaactctagttctaatttttgccattatataggtgtagattggatattcatttctttttaggtacttcacgtctatctatagtaaattatcctcttaggtttaattgtgaacttcttgccttacattaaaaatggattaactttttataactaagaaggcactttcagtaactcttagctattggtaaatatttgttattggattctcctgttgtttaaactgaaaaacaatcaggcaatgagatattaaatgggaaggaggaagacttacttatattccaagggaagacttcagataagaaaaatgaagagaaaacatgcattaggaagaaaaaatctgtttttatttaacaaactttaattgaatacccatttttttccttccttccttctttccttccttcctttctttctttctttttctttctttctttcgacagtctccctttgtcattgaggctggagtgcagtggtgtgatcacagctcactgcagcttcaacctcctgggctcaagcaagcctcctacctcagcctcctgagtacctgggaccacaggcacgtgccaccacacctcattaattttttgaaaaattttttggtagagatgagatctcactgtattgctcaggctaatcttgaactcctgggctcaagtgatcctcccaaagtgctaggattacaggtgtgagctaccgtgcctgacagaatacctatttcttgctaggcacaagcagtacaaagattaaagagatggaggtaggggaacttgtgtataaataaccaattttatttttttaagaaatgtgtggtcattgcctttccccaggaaaagtatttcagtatgctttcttttattaaaccttccaacacagttattatgattactaaatatacattaaaaattgcatgagtctggctgggtgcgatggctcatgcctgtaatcccagcactttgggaggctgaggcaggcagatcacttgaggagtttgagaccagcctggccaacatggtgaaaccctgtttctactaaaaatacaaaagttagccaggcgtggtggcagacgcttgtaatcccagctacttgggaggctgaagcaggagaatcacttgagcctgggaggcagaggttgcagtgagccaagattgcgccattgcactatacccttggtgacagagtgcgactccatctcaaaaaaaaaaaaattgcatgcgtcaatgaaggaagctttagcctggtcagaaaagggatcccagttttttgccccctaaaactactttttaaattttttttgagacaagacctggccctatcacccaggctggagtgcagtggtacagtctcggctcactgcaacctctgccttacggactcaagcaagcctcctacctcaacctcctgagttgtgggactacaggcatgcaccatgacacccgactaatttttgtattttttgtagagatggggtttcactgtattgtctaggctggtcttgaactcctgagctcaagcaatcctcctgcctcagcctcccaaagtgctgggattacacatgtgagccagtgcgcccagcctaaaactacttaaaaatggagatatagtactgtatttaatgcttatgggaaagaaaatgctcttccatttaaagtaaaaggaacaaactgttccaaagctaaatatggtcatcttttaggtcttgggaagaagcacttttccaaatcattctttaagcaaaggtattgaccacattttactctgggagggtattcctgctcatttgagaagcccacaaaatgcctcggcttcaacaacatatccacggttctttgtgttcctctcatctcatccttgcatgacactcggcaagcagggtgacagtaactaacccctatcattcaagttcaagattacagtcttgctgcctccccacatacctaccagacattgccttaatctttgggcaaagattttgatttgacaaaaagcaaataatctcaagagtattgtattttatcatttttcttaactttgaaagggatcttgtagataacaggagtaagaatttggagagggggccgggcaaggtggctcatgcctgtaatcccagcactttgggaggccaaggtgggcagatcacgaggtcaagagatcaagaccatcctggccaacgtgataaaaccctgtctctactaaaaatacaaaaattagctgggtgtggtggcgcacgcctgtagttccagctactcaggaggctgaggcaggagaatcacttgaacctgggaggtggaggttgcagtgagccgagatcatgccactgcattccagcctggagacagagcgagactccttctcaaaaaaaaaagagaggggaaactgaagggctggaaattggcttagcttggtcttgacactgtgctgtatcctttattccctctgaaatagcaaattcttgtgaacttcacagtaggtggtttgtctgagtagagctttttggttttttgttttttcttatatacccagactgctcacctgcaagctttttggtttttatcaggagactttgtgatcttaagatgtttttctatgacttccagaaaagctgtatccacttctcaggtagtcacagttatagggtcgaagatttttctgtctttggggaatctgcgagttttatacctaagtgatttagttattcttggttgatactttctatggctgcattatcagtggttttgaagtaatgaaagcttttgtagaagtcactactggtcactaatttgactcacgcaattctgttctatgagtaccaacacatgtgaaggaaattttaaaataatataaaagtaggcagagtgcagtggttcacacctgtatccccagcactttgggaggcctaggtgggaggatcactggagcccaggagttcaagaccagcctgggcaatacagcgagacccagtctctacaaaaaaatttaaaaattaactgagcgtagaggcacatgcctgtagcctcagctactcaggaggctgagataagaggatagcttgagcccaggaatttgaggctgcagtgagctacgaccatgccactgtactctaacgtgggtgacagagcaagatgctatctctaaaaaaagaaaaaagaaaggaaaaaaatatataaagtgcacacagtgttcttttgtggccacagaaattgcataagatcctaaaagaggaaccatttttttttaggttaaacagtaaaaaaatatacatttttttactgctgtcattataaggtcaattggtagccaagaatcttccatacaattatttacagtctatgctaaagcaggctttagtgtataagacagtgtataagatagtcactgaattcggtcttggaatattttgttatttgagttatgcttttcctaatgtttgatattatgttcttggaggtaatgcccatagatatattaggactaaaaacacatttaagaaacgtgctgttttctgtggcagagaatgtctctgcacttaagttcctcatttgtaaaaaggagataagcagtatcttactccttcatcagataatacttgtaaagcacagctgcactccttgttaggcacgtgttttgcagaaagaaaaatatatgaagtctgaagacattaggatttggagtcacaagatttgcctgcctctctccttccctcccttcttttttaattccctccctccttcccacccttcctccttccacagatgtttttgagcgccgtctatgtctaggacctgtgttaaatgctacacagtactgtttcctgccctcaaagtataatgttaggggtgttggtgggagaaggtcagacatatagaaagaaaattgcagtggagttttagaaatatgcacagtggctgaacctctaacccagactgagaaggtaaagcaaagcttccaagagaaggtgatgccagagtcatactggaagagaagtaagacttgtcagagaaagaagagggtgaggatgttccaggtaaataggacagcaaatggagttttccacagatggaaaactatgatttcattccgagttgttgtgacacaatgtataaggtcgccaggattagagtaactatcatttataaagttgtaattcagcaaattatttgaagatttctaatgaataggttttaaaaaaagaaaattcagggttgcctgagcataacatgtaatgtgtaagggatactttggtgatgtgttatgttaagtggttggactttatcatgtagaccaagagtctctggatggttggtctgacgtggggatccatgcctgtagtcccagctacatgggaggctcgcttgagcccaagagttcaagtccagcctggccaacatagcaagatcccatctctaattaaaaaaaaaaaaagaggccaggtgtggtggctaacacctgtaatcccagcagtttgggaggccaaggtgagtggatcacttgagcccaggagtttgaggccagcctgggcaacatggcaaaaccccatttctataaaaaaatacaaaaaaagttagccagatgtgctggcacatgtctgtagtcccagctactagggaggctgaggcaagagaattgcttgagtctgggatgtggaggttgcagcgagccgagatcacaccactgtactccagcctgggtgacagagcgagaccctgtctcaaaaaaaaaaaaaaaaaaaaaaaagtagtctctggatggatttcaggggggttgttatatcttccctctgtgtgtgtatgtgtgtgtgagcatgctttttttttttttggaaagtgagttaattgcgaccttcagattttcaaagggatttgtgactcaagaaagggtaatcattgctgttggttctggagggctttaagcagaggtgtgacatgctctgatttgtattttagaaagacacttctggtgtctgtgtagaggatgaatatggggccaacagaactatggcagggaagttgttggcagtagtccaggccagagatgataacgagggcttgaattagggtaatggtgatagagatgtggagctgagaattgctttgagaattatcaagtagtcaaaatgttagctgagcatggtggtgtgcacctgtaagcccagccactctggaggctgaggcaggaggatcacttgagcccaggagattgaggctgcagtgagctatgatcctgccactgcactccagcctgggtggtagagcgagaccctatctaaaaaaaacagtcaaaatataagggttggcaattgcctgggtaatgggaaatgagggagagggaggagtcaaaaatggcttctgggtttctggatcctgtgacactggaggtttgccactgaggaggatttggggagagggaggagagagggagataggaagaggtggggcttagggaggagaaaggtgagttaaatttccatttgagtttaaggttcctggcgggggttacccagatatatagttaaagacacagaaggtatgaattaggaacttgtgagcagatatattcttttttattttatttttattttttgagacggagtctcgctccatcacccaggctggagtgcaatggcgcgatcttggctcactgcaacctctgcctcctgggttcaagtgattctcctgcctcagcctcccgagtagctgggactgcaggtgctgtccaccacgcctggctaatttttgtatttttagtaaagacggggtttcaccatgttggccaggctggtttcgaactcctgacgtcaagcgatccacctgccttggcctcccaaagtgctgggattacaggcgtaatcctggccacgcctggcctattttttatttttatagagatgaggtcttgctgtgttacccaggctggtcttgaatgcctgagttcaagcgaccctcccaccttggcttcccagagtgctgagattacaggcgtgagccactgcacccagcctcaccagcagatagacagtagttaaaattatgagaatttatagagaaagaacattgaatgaatgagttcagagaatgaaaccttggagttacccagtctactgccctcatttaccacaggaagaaaatggggggccgggcgcggtggctcacgcctgtaatcccagcactttgggaggccgaggcgggcggatcacgaggtcaggagatcgagaccatcctggctaacacggtgaaaccccgtctctactaaaaatacaaaaaattagccgggcgtggtggcgggcgcctgtagtcccagctactcgggaggctgaggcaggagaatggcgtgaacccgggaggcggagcttgcagtgagccgagatcgcgccactgcactccagcctgggcgacagagcgagactccgtctcaaaaaaaaaaaaaaaaaaaaaaaaaaaaaaaagaaaatggggcccaaagaggataaatgagttgctcaaattcagttttcaaagctgataactttcagaagagggacttggaactctggtctccaactctttgcctcacagaagagagcttgaaaatgaagtgtcttgacatcctctggtttgtttcatgatgtgtaaaataaagccacaactctttaaagttttagattaatgtcaacttttgttttacttacccccacccccatcccagtactgtcccttcaaagtgtaccactttgagagctctttttcaattccaaagttgtcctcaccgctcagaatgtgtttggaactggattctgggaatttccattaaggttttagaatgaatttttggaaagaaccttaatattgatggtggcaaatttcctttggctttgttcttttgttgagggggcaggggcggacaggtctcactctgtcacccaggctggagtgcagtggcatgatcttggctcactgcaggcttcactttgcgggcttcagtgatcctcccacctcagcctcctgagtagttgagaccacaggtgtgcaccaccacactagggtagtttttgtatttttggtagagatggggctttgccatgttggccaggctggtctcgaactcctgagctcaagtgatcctcctgcctcggcctcccaaagtactgggattataagtgtgagccaccgcatctggccagctttttaaaaagtcaggtttattgaggtacaattttcatacagtaaatttcatcctctttagtatgcagttctatgagtttaagaaacaaatacagtcatggaactgccaccactaccaagatatagacatttccattccccttaaaagttccctcatggtggtgcacagtggctcgaacctgtaatcccagcactttgggaggctgaggcaggcggatcaagaggtcaggagttcaagaccagcttggccatcatggtgaaaccctgtctctactaaaaatacaaaaaattgggcatggtgatgcacgcctgtaatcccagctactcgggaggctgaggcaggataatcatttgaacctgggaggcggaggttgcagtgagctgagattgtgccaccacacttcaccctgggtgacagagacagactccatctaaaaaaaaatttccctcatggcggggcgcagtagctcacgtctgtaatctcagcatttggggaggccgaggcgggcggatcatttgaagtcaggagtttgagaccagcctggccaacatggtgaaaccttatctctactaaaaaaatatatataaaacttagccgggcatggtggcaggcacctttaatcctagttactcgggaggctgaggcaggagaattgcttgaacccaggaggtggaggttgcagtgagccaagatcactccactgcactccagcctgggcaacacagcaagactccatctcaaaaaaaaaaaaaagttccctcatgcccttctgtagtcaaccctgatccctaccccaagcccctcacaaccagtactctctttcctgttttcattccctttatagaatgtcatgtaagtggaatcttatgatatgtagcctttgagtgtgtttatttcacatagcagaattatcagatttatctgatcaggtgattgttacgtatatcagtaattttttctttctggtgctgagtagtatcctattgtatggataggcctcagtttgtttatccattaaccagcgactggtcatttgtttgcttccagtttttggcaatgatgaataaaacagctataaatatttgaatacaggtttttgtgtaagcataggttttcatttcttttgggtaaatacctcagagtggtattgtattgctgcactggatgctaagtgaatgtttaacctcatgagaaactgccaaactgtttttcaaagtgattgtaccatttgtcattttccccaacaatgtgtgagaattgcatttgctcaaggtcatcgtcagcatgtggtattgtcagttttttggtttgggtttttaaccattctaatagcagtgtagcaatgtgtactgtggcttaaatttgcatttccctaatgactaatgatgttaagcatcttttcatgtgtttaattgtcatcctatattttgtttggtgaagtgtctcccaaaatcttttgcccatttttaaaactggagtgtttgttttattattattgggttttaagggttctttgcgtattatggatacaagtcctttttcacatgtatatcatcaaactattttctccagtctgtggcttgtcttcattttttaagaatgttttctgggctgggtgggcagctcacgcttgtaatcccagcactttgggaggccgaggcaggcggatcaccaggtcaggagttcaagaccagcctggccaacatagtgaaaccccgtctctacgaaaaaacaaaaaaattagctgggcgtggtggtgggcgcctgtaatcccagctactcgggaggctgaggcaggagaatcgcttgaacccgggggtggaggttgcagtgagccaagatcgcaccattgcactccagcccaggtgacagtgtgagactctgtctcaaaaaaaaaaaaaaaaaaaggttttggatggctcacacctgtaatcccagcactttgggaggccaaggcaggtggatcacctgaggtcagcagttcaagaccagcctggccaacatggcaaaaccctgtctctagtaaaaatacaaaaattagccaggcatggtggtgtgcacctgtaattccagctacttgggaggctgaggtgtgagaatcacctgaacctgggaggtggaggttgcagtgagctgagattgtgccactgcactccagcctgggcaacagagtgagactccgtcttaaaaaaaaaaaaagaatgttttctgaggagcaaaagtttttcattttggtgaagtccactagtaaaagaaaattaactctaaactgaacactgctttgatcccacctaacccagcttaaatgcaagacatgaaagaacaaagtgctcaccataaatttaattgcatcccagaaaaaagttcaagaatatttaacagaagacaaaaacatccagcaccaggtaaaattcacaatgtctgacacccagttataaatttactagacaaacaaggaacaagaaatatttaacttaaggagaaaaatcagtcacccaaaagggacccagaaatgacatcaaatgtggaattagtgggcaagaaaattaaaacggttattataacaatattccaaatctttctgaatgaggaaagattgtacatgttaagaagagacatagcaaatataacaaattactcaaattgaactactaaggatgaaaactcaattacactggagagaattagtaccagattaaacattgtaggagaaaagattagtggacttggcggcatagcaacagaaactatccaaaatgaacagagcaaaaaagaccaaataacgtaaacagagaattagggaggtacagaacttcaggtcgtcagatatacatgtaattagagtccctaaaggagagaatggaggaaaggaagatgacagtaaagatatgtcaaaaataagggaggaaaattgtcaaaatcggataaaaatgataaacctatgggttcaagaagcccagtgaaactcaaacacatgactaatgacaactacaaaaggctaattatcatcaaattggttaaagccagagactaagagaaaatcttaaaagcatccagagaaaaaaagatacattcatttggcagacttcttgtcatgaactatgtaagtcaaaagacagtgaagaaacattgcaacatctttaaagaactgaaggacgctttgggaggctgaggcaggaggattgcttgaagcaaggagttcaagaccagcctgggcaacatagcaatccactgtctctacgaaaaataaaagaattggccaggcatgatggtgtgtccttgtagtcaaagctacttcagaggctgaggtaggaggattgctagagcccaggagttcaaggctgtagtgagctatgatcatgccactgtacttcatcctggacaacagagcaaaactaataatataaatgtgtagttctatatccaaaaataaaacactttcaaaaatgaagagaaacaaatagtttttcagatgtacaaaaactgaaagaaacaatcactaccagactggcacaataggaactgttaaagaaagttcttcagacaggtgggcatggtggttcatgcctgcaatcctagcactttgggaggccaaggtgggcagatcccttgaggtcaggagttcaagaccagcctggccagcatggtggaaccccatctgtactaaaaatacaaaaattagctgggtttgattgtgcaagtttgtaattccagctactcgggaggctgaggcagaagtattgcttgaacctgggaggcggaggttgaagtgagcagagatttcaccactgcactccagtgtgagtgacagagcaaactccatctcaaacacacacacacacacacacacacacacacacacacacacacacgagttcttcagacagaaggaaaaataatacaaaatgaaaatctggatttacacaaaggaatacaaaatagtgggaatggaaactatttgagtaagtatagcctttttttcttattgtttaaatctctttaaaagacaattcactgtttaaagcaataataataataatgtcttgtggggtttatagcttacgtagaagtacagtgtatgtcagcaataccacaaagcctgaaagaaatgaaacggaaatatgccagtgtaaggtcctagtattagatacgaagtaatgtaacatcacctaaaggtagactgtgttatggtaaacatgtaatactatgaaccttaaatcgactactaaaacaaaacaaagcattatagctaataatccacaaaaggaaataaagtggaatcatttttttaaaagctcagttattcccaaaggaggcagaaaaaagagaagaaagaataaaaaacagaagggacaaatggaaaacaaagaacaatatagtagatttaaatctgatcatgtcaatactttctgtaagttaaaatgatctaaatatcataattaaaaagcagaagtttcagatttggctatagaaaagtaagacccaactatatgcatcataaatgaaaccagtcctggatatttttttaatgtaattttttatttaaagaaggggtcttgtcatgttacccagactggtctcaaactcctgggctcaaatgatctgcccacattggcctcccgaggtgctgggattgcaggtgtgagccaccatgcccagccctagtcctgcatatgaagacacaaataggttaaaagtaaatggatggggaaaaaaatcccattctaacactaatcaaaagagagccagaggtaatgatgttagacaaagtacatttcagagaaaagaatattgctagaaacaaagagagccatttcataatgttataaggcttgattcatcaaaaggacataacaatcctaaacgtatgcacctaataacagaacttgaaaatacatggggcaaaatctgactgaactgcaaggagaaataaacaaatacacaattatattcaaagtgtatgacactccttctccttcaataattgatagaacaaggacaaataaataagtaggatatagaagacttgaacagcattgtcaagcaacttgaccacatcacatttatggaacattccacctaacaatagtcacagtagtcaaatgcacctcttttttcttttctttttttttttttttttttttttttgagatggagtctggctctgttgcccaggctggagtgcagtggcacaatcttggctcactacaacctctgcctccccggctcaagtagttctcctgcctcagcctcccgagtagctggaactataggcgtgcgccaccaggcccagctaattttttgtatttttagtagaaacagggtttcaccacgttggccaggctggtcttgaactcctttctcaggtgatccgctcgtgtcggcctcccaaagtgaggtgtcacaggcgtgagccaccgccccggcttgcacatcttttcaggtgcacacttaccaaggtaaagcatattctgaaccataaaacaagtgtcagtgaattttttttttttttttttagaggaaggctcgctctgtcgcccaggctggagtgcagtggtgcgatctcggctcactgcaagctccgcctcccgggttcacgccattctcctgcctcagcctcccgagtagctgggactacaggcgcccgccaccacgcccggctaattttttgtatttttagtatagacggggtttcaccgtgttagccaggatggtctcaatctcctgacctcgtgatccgccctcctcggcctcccaaagtgctgggattacaggcatgagccactgcgcccggctgtaaattttaaaagattcaatacatacaaagtatatcttctgactacaatagcattaaattaaaatttcagcctgggcaagatggcaaaaccccatctctacaaaaattagaaaaaaataattagccaggttggtggcaaatccccatctctacaaaaattagaaaaaaataattagccaggttggtggcatttgcctgtactcccagctacacaggaggctgaggtgggagaatcacctgagcccagggaagttaaggctgcagtacaccgtgatcacaccactgcagtccaccctgggtgacgagtgagactcaaaacaaaaaacaaacaaaattaatacctgcaggacatttttgtaaaaaaataaaaaattaattaattaaaattaataacagaaagaggccagtacagtagcttgcgcatgtaatcccagcatttttggaggctgaggtggcaagatcacttgaggccaggagttcaagaccagcctgggtaacatagcaagacctcgtctcccaaaaaataaaaaaaaattagggagacgtggtggcctatgtctgtagtcctcactagttgggaggctgatgtgggatgatcatttgagcctaagagttcaagtccagccaaggcaacacagcaaaacaccatttcttttaaaaaaaagaaaaaaagtaagcaaaagaaaggaaacacagtaataatcatcagggtgaaaaatcaaagaaaaagaaaacaaaaaaattagaaattaaaacaataaaactaagaacagtaaaagatcaataaaatcagtaaacctctagccaaactgattagaaaaaaagagtgaagacgtgaattgccaatatcaggaatgagagaagtagtatcactacataatctacagatattaaacggttaatatggaaatattactaacaactttatacctatactttgacaactttgattaacagaaaaaaaataaaagacacatactatcaatgctttttcaagaaaaattgataagctaaataatgctctactaaagcaatttaatctgtagttaaaaatattcccacaaggaaaattattagagcagatggctctcactgggaaatccaccaaacatttaaagaggaaataaaaccaattctatacagactcctccagaaaactgaagagaaggcgacacttctcaactcattctatgaagccagcattactctaataccaaaaccagacaaaggttaaaagaagggtatagatcaataacttccatgagtgtaaatgtaacaatccttagtaatattttaacaaattgaattcaatgatatataaaaaagataacaggtgatgtcccgctgatgtttattccaggaatgcaaggttggttaacatttgaaaatcaatcactatatttacagactaaaaagaaaattattactaaaaaaaaagaacaaaaccaagtctatctgattatctcaatagatacagacaaagcatttgacaaagttcaatatccattactgacaaaaacctcttagcaaactaggcatagaagtgattcggctgggcacgtggtggatcatgcctgtaatcccagcactttgggaggacaaggtgtaaggattgcctgagctcaagagaccaacaccagactgggcaacatggtgaaacttcatctctacaaaaaatacaaaaattggccaggcgcggtggctcatgcctgtaatcccagcactttgggaggccaaagtgggcagatcatgaagtcaggagatcgagaccatcctggctaacacagtgaaaccccgtctctactaaaaatacaaaaaaaaagtagctgggcatggtggtgggtgcctgtagtcccagctactcgggaggctgaggcaggagactggcgtgaacccaggaggcaaagcttgcagtgagctgagatcgcgccactgcactccagcctgggcgacagagcaagactccgtctcaaaaaacaaaacaaaacaaaacaaaacaaaacaaaacaaaacaaaaattagctgggcgtcgtggctcctgactgtagtcccagctacttggaagcgtcccttccaaggttggaggatcccttgagcatgggaggtggaggttgcagtgagctgagatcgcaccactggactccatcctaggtgacacagtgagatcatgtctcaaaaaaaaaaattcctcctggagtgagcagcagaaaaaacaaaaaataaaagactaggcacagtggctcatgcctgtaatcccagtgatttggcaggacgaggcaaggggggttgcttgaggctaggagtttgagaccagccttggcaacatagcaagaccccatctctacaaaaagttaaacaattttttaaaaattagctgagtgtggtgctatgtgcatgtagtcctaggtacttgggcagctgaggtgggaaaactgtttgagcccaggagttcagtgttggagtgagctatgataatgcctctacactccagcctgggcgacagagcaagatcctgcctataagaatcaaagtaggccggtgcagtggctcacgcctataatcccagcactttgggagggtgaggcaggcagatcacctgacgtcaggaattcgagaccaacctgggcaacatggcgaaaccctgtctttactaaaaatataaaaattagccgggcatgatggtgggcacctgtaatcccagctactcagaagctaagggacaaaaattgcttgaacccgggagatggaggttgcagtgagccaagatcgcaccattgtactccagcctgggcgacagagcaagactgtgtctcacaaaaaaaaaaaaaaaaaaaaaaaaaaaagaatcaaagtaaaaaaatcaaagtaaatcaaagtaaaaattataataaaaaaattacagaagagaaaagaacttatcttcctcaagctaattaagggtatctatgaaaaaccaatagctaatattatacttcatagtaaattaataaatcttttccctaagatcagaaacaaggcgaggatatccactcttcacttcttttattcaactttatactgcagattttagccaacgtattaagacgtgaaaaagaaatgaaaagcatccagattgaaaaggaagatgtaaaactctttatttacagacaacatgataacctatgtagaaaattctatagaacctacaaaaagtgactgtaactaataagtgagttctgtaagtttgcaggatgtactatcagtgtggaaaaaaattaattatctttctatgtcctagcaactaacaatcagaaattgaagggaagaataccaaaatagtatccaaaaatatgaaacagggagaaagatgggcaagacccataatgaaaactataaaacattgataagagaaattaagtaagatctaattaaaaggagtgatatgccatatttatgtattagaaaactcaatattgttataatgtcagttttgcccaaattgatctagtgattcagtgaaattccttttaaaatccctgtagatctttttgcagaaattgacaagctgattctaaaattcatatggaaatgcaagagaactagaatatccaaaacaactctaaagaacaaagttagagaatttgtagtagattccaaggcttattataaagcagtagtaaccaagacaatgtggaattggcatccagatagacaaacagattaatggaacagtatagtgatttgcgacctagaaactgaccaaaaatatatggtcaatttatttttgataaaggtgtaaaggtaattcagtggagaaatcagtctttcaacaaatggtactggaacaatggcatattcatgtgcaaaactttgatccatatgtcataatgtatgaaaagttaattgaaaatggatcatagacctaaatataaaattaaatgtaaatatgacttctaggagaaaacctttctgatttaagattaggtgaagattttttagatacaaagccaaaagcatgatccataaaagaaaaattgataaattggacatcttcaagattaaaaatttctgatcctctaaaaacaagccacagactggcagaaaatatttgccaattacataagtgataaaggacttgtatccagaatatatataattttaacctctcaaaactcaataatacaaagtttcagttaggagggtaagttctggatatctattgtacagcatgatgactatagctgacaataatgttgatatagtttggatattttttgctctaaatctcatgttgaaatttgatccctaatgttttatttatttatttatttttgagatggagtctctctctgtcaccaaggctggagagcagtggtgcgatctccaccaactgcaatctccacctcctgggttcaagcaattctggtgcctcagcctcctgagtagctgggattacaggaatgcgccatggcgcccagctaatttttgtatttttagtagagacggggtttcaccattttggccaggctggtctcgaactcctgacctcaggtgatccacccaccttggcctcccaaagtgctgggattacaggcatgagccaccgtgcccggccagatccccagtgttttagatggagcctagtgggaggtgtttgggtcctgggggtggatacctcgtgagtggcttgatgtcatcctgtgggaatgagtgagttctcattttactagttcctacaagacatgattgtgaaaaagagcctggcatccccctcctctctcttccttcctttctcactatgtgatggctgctccctttccccttctgtcatgagtggaagtgatatggtttggctgtgtctccacccaaatctcaacttgaattgtatctcccagaattcccacatgttgtgggagggacctagggtgaggtaattgaatcgtgggggctggtctttcccgtgctatccttgtgctagtgaataagtctcacaagatctgatgggtttatcaggtgtttttgcttttgcttcttcctcatttttctcttgctgccaccatgtaagaagtgcctttcacctcccaccatgattttgaagcctcccagccatgtggaactgtaagcccaattaaacccctttttcttcccagtctcaggtatgtttttatcagcagcatgaaaacagactaatacagtaaattggtaccagtagagtggggtgctgctgaaaagatacctgaaaatgtggaagtgtctttggaactgggtaacaggcagaagttggaacagtttggagggctcagaagaagtcaggaaaatgtgggaaagcttggaacctcctaaagacttgttgaatggctttgacaaaaatcctgatagtgatacgaacaataaggtccaagccgaggtggtctatctgatggagatgaggaacttgttgggaactggagcaaaggtgatgactcttgttatgttttagcaaaaagactggaggcattttgcccttgtcctagagatttgtggaactttgaacttgagaaagatgatttagggtatctggctgaagaaatttctaagcagcaacacattcaagagatgacttgagtacttgtaaaggcattcagttttgtaagggaagcagagcataaaagttgggaaaatttgcagcaggattatgcaatagaaaagaaaaacccaggccgggcatggtggctcacgcctgtaaccccagcactttgggaggccaaggcggggggatcacgaggtcgggagttcaagaccagcctagcaaacacagtaaaaccctgtctctactaaaaatacaaaaattatctgggcatgatggcgtgcacctttagtcccagctacttgggaggctgaggcaggagaatcgcttgaacctgggaggcggaggttgtggtgagccaaagtggtgccactgtactccagcctgggtgacagagtgagactgcatctcaaaaaaaaaaaaaaaagaaaagaaaaacccattttctggggagaaattctagctgctgcagaaatttgcataagttgcaaggagcctaatgttaatccccaagaccatggggaaaatgtctccaggccatgttggagaccttcacagcagcccatcccatcacaggcccagaggcccaggagaaaaaagtggtttcatgggctgagcccaggatccccatgctgtatgcagccaaggacttggtgccctgtgtcccagcagctccatccatggctgaaagggaccaatgtacagctcaggctgtggcttcagagggtggaagctacaagccttggcagcttccacgtggtgttcagcatgcgggtgcacagaagtcaagaattgagatttgggaacctctgcctagatttcagaagatatatggaaaagcctggttgccctgagaaaagtttgctgcaggggcagggtcctcatggagaacctctgctagggcagtgtggaagggaaatgtggggtcggagcccccacacagagtccctgctgaagcactgcctactggagctgtgagaagagggccactgccctccagaccctagaatggtagatccattgacagcttgcaccatgtacctggaaaagctgcagacacaatgccagcccatgaaagcagccaggagggaggctgtaccctgcaaagccacaggggcggagcttcccaagaccataggaatccacctcttgcatcagcatgccctggatgtgagacctggagtcaaaagagatcattttggagctttaaaatttgactgccttgctggatttcagacttgcataggccctgtaacccctttgttttggccaatttctcccatttggaacagctgtatttacccaatgcctgtacccccattgtatctaggaagtaactagcttgcttttgattttacaggctcataggtggaagggacttgccttgcctcagatgagactttggactgtggacatttgggttaaggctgaaatgagttaagactacgggggactgttgggaaggcatgattgattttggaatgtcaggacatgagatttggaggggccggggcagaatgatatggtttgactgtgtcaccacccaaatctcaacttgaattgtatctcgcagaattcccacgtgttgtgggaaggacccagggggaggtaattgaatcatgggtgccagactttcccatgctattctcatgatagtgaataagtctcacgagatttgatgggaataagtctcacgagatctgatgggtttatcagggggttctgcttttgcttcttcctcatttttctcttgctgccaccatgtgagaagtgcctttcgcctcctgccatgattctgaaacctccccagccatgtggagctgtaaatccaattaaacctctttttcttcccagtcttgggtatatttttatcagcagtgtgaaaacggactaatatatgaagcttcctgagttcctcaccagaagcagatgctagcatcatgcttctcacacacactatgtaactgtgagccaaataaaactctcttttcttttgttttctttttctttctttcttttctctttctttctctctctctttctttttctctttttctttctttctttcttttctttcttctttcccttccttccttcctctctctctctctctttcttttccttccttccttccttcctttctgtctgtctcttccctcccttcctccctcccttccttctttccttccttccttccctctcgctctgtcacccagagacagggtctcactctgtcatccaagctgaagtgcagtggcatgatcacagctcactgcagccttgacctccctgggttgaggtgatcttcctgcctcagtttcctgagtagctgggactacagatacatgctaccacacctggctaattttgtattttttgtagagacagagtttcactgtgttgcccaggctggtctcgaattcctgggctcaagcaatcctcccaccttggcctcccaaagtgctgagattacagtcctcactcatgctacaaacactgccttctctctgccttctggagtagaacaccttttctcctcctgcctttggacatcagactccaggttctttggctcttggactctgacacttgcaccagcagccttctgggggctctcaggcctttggcctcagactggggttgcattgttggcttccttggttttgaggcttttggtcttggactgggacacgttactggcttttctttctcattttctggcttgcagacagcttgtcctggaacttcgcctttgtaatcacatgagccaattctctctaaaaaattccctttcatatacaaatatatgaaatatatgtatatatatcctattggttttgtccctctggagaaggctactacaaatgtattgtgtaaaatgaaataaaataaatgtcagcatttgattatgttttgtaatatattttctctttttggggccattgtaggtacttaatatttgttaattgcatggatggatgaataaataaatgtcaaaatgctcatattttaaaaatgcattgtatatgagaaaattgctatgaaaggccacgtgcagtggctcacgcctataatcccagcactttgggaggccgaggcggacagatcacttgaagtcaggagttccagaccagcctggccaacatgggggaccctcacttctactaaaaatacaaaaaattagccgggtgtggtggtgcatgcctgtaatcacagctacttgggaggctgaggcaggaggatcactggaacctgggaggtggagtttgcagtgagccgagatggtgccactgtactccagcttgggtgacagagtcagactctgtctcaaaaaaaaaaaattgctaagagagtaggttttagatgtctcaacatgaaaaaataaatacatgaagtgatgcatccatttttttttttttagacagagcctcactctgttgcccaggctagagtgcaatggcgtgatccctgctcactgcaacctctacctcccaggttgaagtgattcttctgcctcagcctcctgagtagctgggactacaggcatgcgccacttcacccggctaatttttgtatttttagtagagacagggtttcaccatgttggccaggctggtcttgaactcccgacctcaagtgatctgcccacctcggcctcccaaagtgctgggattacagatgtgagccaccatgcccggccttgtgatgcatctattttttattgatacataatattttacatatttatggggtacatacgatattttgtgacctccacagaatgtgtaatgaccaactcagagtatttgaggtaatcatcactttgaatatttatcatttctatgtgttgggaacatttcaagtccaagaaatatatgaaatatatgaaaaaatgttcaacatcactaatcatcagggaaatgcaaatcaaaaccacaatgatgtatatgttaattagcttgatttaatcattccacaatgtatgcatatattaaaacatcacattatactccgtgagtatatatttttgtcaattatacaatactcaatactttttaaaatgagcaatctcattaaaacaggttagatgtgggcaaaagatgtgaacagatacaccaccagagaagttatggaatgtgatagcatcatctaaatggatgttcagtgttcattagtcaggaggaaaatgcaaattaaaaccacaatgaggggtgagcgcagtggctcacacctgtaatcccagcacttgaggagcccaaggtgggcagacaacttgagcctaggagtttgagaccagcctggacaaaaaatacaaaaattacaaaaatacagaaattagccaggtatggtggtgcgcaccagttgtcccagctactcaggaagctaaggtggggggatggcttgagcccaggaggtcaaggccgcagtgagctgtgatcacgccactatactccaacctgagtgacagggtgagaccctgtctcaaaaaataaaaaataaaaataaataagaacacaatgagatacaacacacttattagaaaggccaaaattttaaagtctcatcataccaaatgttagcgaggatgtgacacaactggaattccatacgctgcgagtgggaacataaaagctctaacctctttggaagacaattgggcactttcttaaaaagttacaaatacactgaccatataacctaggcattcaattccttagtatttacccaagagaaatgaaagtgtatatccatattaagacttttatataaatagcagctttattagtaacagcaaaagtggaaacagcccaaatgtgtgtccacaggtggatagattaaaacaaattgtgttatatatctatacaacagattactacttggtaattaaaaggaatgaactactgatatctactacagtatggacaaatatcaaaaaaatgcacaatgaaagaggccagaccacccaccctataaaaaaacagttcatactgtgtgattccatttgtatgaaattttagaaaattcaaaccagtctataattacagaaaatagatcagaggtggcttgggtgtgggggaatggggttggtagcagggcgtgatatcaaagcttcataaggaaacttttgcgagtgataggtaactttactatcttttaaaaaaaattgttttcttttttttcttttctttttttttttttttttagaggcagtatctggctcttttgcccaggctggagtgcagaggcgtgatcatagctcattgcagcttcaaactcctggcctcaagctatcctcccacttcagcctcccaagtagctgagacttcaggctcgtgccaccacacttggctaatgttttaaaaacaaatttttgtagagatggggtttcactctatctctcagcctggtctctaactcctggtctcaagtgatcctcccaccttggcctcccaaagcgctgggattacaggtgtgagcatcatgcccagccttaaattcaccattttgattgtggtgatggttttgcagatatgtatgattttactaaattgtatacttttaatgtgcacgatttattataagttaattatacttataaaatattttttaaattactatttttttaaagactagagagaaaacattacagagtggagcaggaaaagttcttactttctgagactgtctcagattatgagattacaaagatggctggacacatatattacctcctgtcgctatctacagaccactcaagtgacagtaaaaaatgcttttttttttttttttccagagatgaggtctcactgtgtcacccaggggctggagtgcaatggtgcaatcacatctcactgcagcctcaacatcccatgcctgagcgatcctttcccacctcagccttctgagtagctgggctgggactataggcgcacaccactatgcccagttaatttaaaaaaaatttttagagatatgcttttactgggttgcccaggctggtctcaaactcctggcctcaagcaatccacccacctcagcctcccaaagtgctgggattacagacatgagccaccaggctcggccaaaaaatgcttttaaagagataagcatatttgttgttgttgttttttttttttagagacggagtctcgctctgtcgcccaggctggagtgcagtggcacgatcttggctcactgcaagctccgcctcccgggtttacgctattctcctgcctcagcctcccgagtagctgggactgcaggcgcctgccaccacgcccggctaatttttgtatttttttaggtagagacggggtttcaccacgttagccaggatggtctcgagctcctgacctcgtgatccacccgcctcggcctcccaaagtgctgggattacaggtgtgagccaccacgcccggccgcatatttgttaagagaatagatcttggccaggcacagtggttcatgcctgtaatcccagcactttgggaggccaaggcagctgaatcacttgaggccaggagtttgagactagcctggccagcaaggtgaatgctgtctctactaaaaacacgaaaattagctgggcatgatggcgcacacccgtgatcccagctacttgggaggctgaggcaggagaatcactcaaaccccggagacagaggttgcagtgagcagtgatcgtgccactgcactccagcctcggcaacagatcaagactctgtctcaatttaaaaaaaagagagagagagagcgagagagagtagatcttaaatgttctcatcaccaaaaaagaaaaagaaaaagataagtatacaagctgatggataggttagttagcttgtttggggtattcgtttcacaatgtgtgtatgtatatgtgtatatacttatatgtacatatatacttaaatacataaagagaagcccatatatatgtatatatacttaatatatacatatacatacacacattatatataaatacacatatatttatatatatatgaaaattacatgatgtacactgtgaatatatgatgtacactgcaatttttatttgccaattatacctaatacccccaaagaaacaaagatataaacatagaaagacaaagaggatggagaaggagaaagtaaaactttgagagctttaaagcagataaagctgggtgtagtggctcacacctatcatccaacaacttgggaggccaaggcagggggatcacttgagtccaggagtttgaagtcactgtgtgcaacatagcgagatcctgtctcttaaaaaaaaaattaaaaagaagaagcagatgatgaaagctgaattatagttgggggttgagaaagctgagaagcagcctgcttttcattgcaggaccccacaatagtataacttgccaagaccagctcgcaggacacaggcagcaagcaagagagagaatcttctctggggagtcggaccagccggtgagaaaagacctaaatatacacctacagagattgagccacaagccacatcatagagcttaggatagacgctcagcacttcattcttatatgtgaagagactgtcaaagattgtcagtcatttggggaaaatatctaaatcatgggcaaacagaaagtaaagaggagagaaggaatcaaagaaataattcaagaaaatgccaaacagagggatatgaatttctagattgaaaaggcccactgagtacccagcacaatggatgaaaatagactctcaggaaggcacataattttgaaaattttagtgctgtggtttcaaagaaaagattctataagcacccatagagaaaaaaagaatataccaggccgggcacagtggcttacacctgtaatcccagcactttgggaggcagaggcgggtggatcacctgaggtcaggagtccaagaccagcctggctaacgtggcgataccccgtctctactaaaaatacaaaaaaaaaaagaaagaaaattagccaggcacggtgacgggcacctgtaatcccagccactcgggaggctgagacaggagaatcacttgagcctgggaggcggagcttgcagtgagccaagaacgcgccactgcactccagcctgggcgacagagcgagactccatctcaaaaaaaaaaaaaaaaaaaaaaggtagaaatctatatacaacaaaaagtgcacacacacacacacacaaatcatgtatacaaataatcatttcctcagtcaaactagcctcatttcaaaagcttaagagccacatgtagctagtcactaccatattagacagcacaggcatagaacatgtccatcactgcagactgttttattggacagccctgctctaagtatctctgctcctgatttaaactagactaaacttgcataaaatcaaatttcctacatactttcatagtggccaatttcctctgattacactttgttttgttgtttggttgcaagataaatgcatgttttctttttaaggtgtgcatgtatcaacattatcatttttattttgttttacagttgttttttctgcaatgatatttgggactattacaaatcaagatctgcctgtgatcaagtgtgttttaatcaatcataagaacaatgattcatcagtggggaagtcatcatcatatcccatggtaaagtaacattaaaattatacctttagctgtttttctctagagaacgtaatttgtaagttattgaagcctaccatggctaaatgggcttctctttatgtatttaagtatattatgtcctcacatctggtaccaacagagcatctatactcctagctccctggcactccattccttcaagaaccgtattcttcatatgaggatttaggaaggacactgattgataactagcatgaagtaatgagtagagtcgtcccttggtatacagcggggatggttccaagactctcactaataccaaaatccatggatactcaagtacctgatataaaatggcttggtatttgcatgtaacctatgcagattctgtatatttttgagacagtctcattctgttgaccaggctggagtatagtggcatgatcatagctcactgcagcctcgccctcccgggctcaagcaatcctcccacttcaacctcccaactagctgggactaaaggcacatgccaccacacctggctaattttttttattttttgcaaagatggggtcccactctgttgcccaggctgatcttgaactcctgggctcaactgatcctaccacctaagcctcccaaagtgctgggattacagtcctcagccaccatgcttgaccctcctgtatacttttaaaattatctctagattacttataatacctaatacgatgcaaatgctttataatacctaaacaactatgtgactagttattataccctattgtttagggaataatgatgacaagggaaaaaagtcggtacatgttcagtacagatgcaaccccatttttttcggaatattttcaatctgtggttggttgtatccatggatgcggaacccatggttacagagggccgactgtatttccttttctccttaaagagaatcctggcttttcttccaagcctgaatccctcacttccagctgcccccagtatataggtagattttccatttgcacatcaaaatccacctatgtcatttattttatttcatttctatttccccaagcctgctcttattcttgtatttattgatttctgtttatacccctgtttagttcccaggcttgaaagctcagcatcattttggactactttctttctattactttcacatttggtcagttaccaagtgttgtcgatcccctttaggagttctcatataatcatctcatattctctagtctcactgccacttccctaagtcaagccctcgttaactccctcataatcacagtgatatcctaagtggcctcttcctgctacaattcatctcagaggtagctgctgggctagcctccctgaagcaggcacatccttcattgcctggctctgaaccctccatgatttcccattacttagactgataccaagattgctcagtaatctggctctggctccttcaagttccgactttgtttttcatgactcctctcttttacgctgttcgtcttgtttttcattaccccctctcttgtgctattcctacccctctattttaaaaacatatatttagtaaatttactcaagggaagcttaagtgatggagaactgaaaatagtagaaatcagccaggtacagtagctcacacctgtaatcccagcactttgggaggccaaggtgggtggatcgcttgagctgaggagtttgagaccagcctgaggaacatggtgaaaccccgtgtctatcaaaaatacaacaacaacaaaaaaattaaccagccatggtggtgtgcgcctgtggtcccagctacttgtgaggctgaggccggaggatcatctgagccagggaggtggaggttgcagtgagccaagattgtgccactgccctccagcctgccttggcctcccaaagtgttgggattacaggcatgagccactgctactggctgatatatatctcatatatatatatgatatatatcatagattttttttttgtagagacgggttttgccatgttagccagatgggtctcgaactcctgacctcaggttatccgcccaccttggcctcccaaagtgctgggattacaggcatgagccactcactgcacctggctgggaatcgcgtttcaacatgagctttggaggggacacacatccaaaccatatcaccaactattccatattcttcaaatttgcttttaagagatgactatactaaggcaccaagtattcacagcagctgagtgagatgtactgttttttttttcctgtcagtgattagagagcataggcaggcaatccaccataactctaaaattatctctccttaccaaataggttcatttatacctcccttcctccagaaagtcaaagctgcatttaatgtcacattcctcctgaacagatcttgtgccattgcggcacagtctaaacaaaacaaaacaaaacaaaacaaaacataataaaaacaaaaataataaaaacaaaaagtctccactatggtttaatgactggttttctctttgtgaagaactgaagttactggagttgaccaaatgtgtttgacaatcatgacctcatatttcaggcaggtggcctgcacaagccagctcattttctttatttgccatgtcccaccctgtacttctagagaatgagttgttgatttgtttgtttgttggttggttttctgtaacaaggatttgggaaagaatggtggactttgtgtgatggatcattttacgtgctttctctggacttttcacagcttgtgcagctgttttacttacgtaagcagacaacaactgtgttagtgatttcatgtcctcattagttagctatacttgttataagaagatcaacagactgaatttcagtgttattacaaaagttgtatttttttttaacattgtgattttgagatatcacagtctcttaaattccagtgccttcatggctctgtgggactcagctctgccaggtggtgaagaacgtggcctggccttcaagaacatcccttggctcctggtcagcctggctcaagctattcccggactgccagcggtggagcccactccctctgtactgtgcatttatcatgctattctctcttctctgaagcccgcagatttgtctatccagattgtggattgtacccagctttaatttttaaaaactttttacaggggctgggcacggtggctcacgcctgtaatcccagcattttgggaggcccaggcaggtggatcacctgaggttgggagttcgagaccagcctggccaacatggagaaattccgtctctgctaaaaatacaaaataaaccaggcgtggtggcgcatgcctgtaatcccagctactcaagaggctgaggcaggagaatcgcttgaaccccagaggcggaggttgcggtgagctgaaatcatgcattgcactccagcctggcaacaagaacgagattatggatttctggcaagaatttcccaggagcgtgcccttcccagagcatcatattcagagtgacaggaagtcatttggtgtcattatgaagatgtgaaccttgatcattagagttagacagtgcatgccaggtatccccactgcaaagttactattttcttcacttataattaataagtgtcttggaggggatgcaaatatcctgttccttctttaattttcacctactgattttagcacccattggtggatcttgcctacgattattatggtggtgtttgcctaatggtgcttttctttttcctacattccctctatgttaattggaatgctttgtaaggaagcactgcccctttcccctcattttatttatgtatttattcaattttttatttatatcagtagaggcccatgaatatttattttatcctctggattgtaacccaatacaatcattatttattttgttgctcaaattcttccagctttggccattgggagctacttcagttttgctcctgtgtcctttcaacatctcctcatctttttccaagcccttccttaatttttgacacactaccagatagttcaggttcatcttgtatttttcttttcttgccttaaccctggaattcagcacttctccaaagagcactggcttctctggggggtagtatttaggaaccaagatctgagagttgggtgtgcccattgctgctgggatatcattgcttctaggccctctcggcaggcagagcctggaaatacaatatatagataatctaattttagaattactaacccataccctggtgagaaatagatttactaactaaaggacagtatttgtgtacagtgctttttgtctttagccttaagggatccaaagtattattttctgaagttacttaggttagttcctttctttcccatcccttcactatggttttattatttatttgtgatacaattgaattaatttggttcgtattccgtcttgatatttcttccagccccctcatttcacatattctagttggtttatttatttattttatttattatatattcttttactagagacagggttacaccatgttgccaaggctggtctcgaactcctggactcaagcaatctgcctgcctcggcctcccaaagtgctgggattacaggtgtgagccaccacacctggattattattattattattattattattattattactttgagacaagatctcgctccgttgtccaggctggagtgcagtgacacaaacatagctcacttcagcctcaacctcctaggctcaagcaatcctcctgcctcagcctcccaaagtgctgggattacaggcgtgagccaccacacctggattattattattattattattattattattattattactttgagacaagatctcgctccgttgtccaggctggagtgcagtgacacaaacatagctcacttcagcctcaacctcctaggctcaagcaatcctcctgcctcagcctcccgggtagcaaggaccacaggcatgcaccaccatgcctggctaattttttaattttttgtagagatggggtctcactttgttgcccaggctgatcttgaactcctgggctcaagtgatcctcttgccttggcctcacaaagtcctgggattacaggcatgagccactgtgcctgaccctcctgattggtttaattacttgttttttgagacatgacatgactcttgtcctaaaagtcaaaacaatgtgaaacagtatactcagagaagtatcactgtctcctcactcctactgacaagtttccaccctctttctacatatccctgtaattaaccaatccctttagatgttttgctattattccagtatttattgtgcacaagtgaccagatacatatatatttccttatattctcctctttcttacatagcatagcatacttgaaggtagatactttttgcacctagctttcttcacttaacagtacatccaggaaatcattgcaaatcagttcttagaggttgtcttcattcttttttatagctacatagtaccccctggtgtggatgtaccataatttgttcaaccactcatctatgtacgagcatttaggttgttttcagtattttgcaattatgaattgtgctgcaattaattgctagaggtgtgcttattcccagaagtgagattgctggctcaaatggtgagtgaatcgcaagttttattaggtattgccaaattcttctccagaagggttgtgcagggtgtgttcccccagcaatgcaggagaaaactgtttccccatggcctcaccgacaaaatgtgttgtcatattttttaattttttgccagtctgatagaggagaagtgatatattagtcttgttttaacttatggatttctaattataagtaggtttaatattttctcatatgcttgagggccattcttttttttctttttttgagatggagtctcactctgtcgcccaggctggagtacagtagtgccatcttggcttactgcagcctccgcctcccaggttcaagcagttctctgcctcagcctcccaagtagctgggattacaggtgcctgccaccacacttggctaatttttatatttttagtacagacagggtctcaccatcttggccaggctggtctcgaactcctgaccttgtgatccgcccaccttggcctcccaaagtgctgggatttcaggagtgagccaccgcccctggctgagggccattctttatatcttttttcttgaattgtgtattcaattctttttcccagttttctactgtgttttggttctgtgtccctcaattttcaaaggttctttttatattaggggtattcgccctttacttgtaatatatgttggcatattttcttctagtatgtcagctgggtttttttgttttgggacggggtcttgctatgttctccaggctggacttgaactcctgggctcaagtgatccttccacctcagcctcctgagtagctggaactacaggcatgtaccaccatgcttgacttgtctattattttttactttatcttgtgcccatcttttatgatccagctcaattactggacttgggtgaaaaacttaaacatccggcttagaaatctcttctccctcctttgaagttccagggcacttacaatttacatttcaaagtatttggtatctttttatgggacacttgtatttctcctgtgttttacttatttattcctaggagactcaaactctttaagggcaagattagtcttttttttttttctagtctcatagtactcagcagatggtcttgcacttaccatatacttactaagtgaacaaataagaccagaaatatggtttttgactggtagcagaagagctaccctgctcttcacctgaagaaatatgtgtgtgctcatgtgtgtgcatgtgtgcatgctgtgttcagccatgtaaaggagataggaggtgggggactccacagcagaagctgctccaacccctgctctcaatatatcttaattaattaattaattaattttttgagacagagtctgactccgtccctcaggctggagtgcattggcgggatctaggctcattgcaacctccatctcccaggttcaagtgattctcctgcctcagcctcctgagtagctgggattacaggcgcctaccaccacacccagctaattttttgtattttcagtagagatggggtttcaccatgttggccaggctggtctcgaactcctgacctcaagtgatctgcccacttcagcctcccaaagtgctggaattacaggcgtgagccatggcgcctggcctcatatatctcaattatttaaagcaggcaagaagtgtggtggcagtgtggctatggggacatctgcccagaaaatttggtttttaaatttcctctaacacagataccaatttaccattgctttataaatttttatctatataccaacaatcacaaaaatatttacctatatattatagattttataattacggtctgattagtttgctaggggtgatacaacaaactaccacagactgggcaactgaaaccaacagaaatttattatctcacaattctggaagctagaagtccaaaattaagatgtcagcagggttggttccttctaagggcagtgagcaagaatctgctccaggcctctctccttggttggaagatggctgtctttctgttcacatggtgttcttactgtctgtgtatctgccttcaaatctcctctttttttttttttttttttttgagacagagtttcactctgttgcccagtctggagtgcagtggcacgatctcagctcgctgcaaccgctgcctcccatgttcaagccattctcctgcctcagcctcccgaggagctgggattacaggtgccaaccaccacttccagcttattttttgtatttttagtagacatagggtttcaccatgttggccaggctggtcttgaattcctgacttcaagtgatctgcctgcctccgcgtcccaaagtgctaggattgcaggtgtgagccaccgtgccctgcctcctcttcttataaggacacgagtcatactggatttaggcccaccctaatgacccattttaacttgattaccactgtaaagaccatctccaaataaagttgcatttgagggttaggacttcaacatatgaacttgcagaggtagggggacatacgccatgacagtccgtacaacattttagaaatgcagcccaatgttatttatcttttctttagagaattataattaataggaccttcagtcggcaacgtgttctcagtgggttccagcttgtgtgggtgttgcgtgcagtgtgtcagcatgcatatgtttgataaagttttgatgtgaagaaggggaggccttagacctgcagttttcatgaattcactttgttctatctgcaacgtaggtatcagaatccccggaagacctcgggtgtgcgttgagaccccagagctcagggacagtgtacgaagctgccgctgtggaagtggatgtatctgcttccatcacactgcaagtgctggtcgatgccccagggaacatttcctgtctctgggtctttaagcacagctccctgaattgccagccacattttgatttacaaaacaggtaagtggaggaataccttcttgacataaaatgtggttcatttggaattttgtttcaagtttctgttcatgtttattgtaaaccttttttttttgtgagtcagggtctctctctgtcacccaggctggagtagagtggcacaatcttgtctcactgtagcctcgaccttccaagctcaagtaatccccccaccccagtcctcccaagtagctgggactacaggcgcgtgccaccacacccagctaattttttaaattttttctaggcaccatggtttttcaccatgttgccaaggctggtcttgagctcctgggtttaagcgatccacccacctcagccttcaaaagtaccgggattacaggtgtgagtcactgcgcctggcctcggcctgttttttgtaactcttatcttcagtgaaataatgaactaaaaatacagttagggcatcaatacatgacattatatatctgtcaaatctcataggatgtataacacaaaaaatgaaccctaatgcgaactatctcgctctgtcatccaggctggagtgcagtggcctggtcttggctcactgaaacttctgtttcccaggttaaagtaattctcctgtcttagcctcctgaatagcggggatcacaggcgcacaccaccacacccagctaatttttgtatttttagtagagatggggtttcaccatgttggccaggctggcttcgaactcctgacctcagatgatcctcccacctcggcctcccaaagtactggaattacaggcatgagccaccgtgcccggcccaaactatgaactttaaaattggttcatcaattgtaacaaacatatcacacctatacaagatgttaataataagggaaactgtgtgtggagggaagggcatatatggcatctttctgtgtcttctgctcaattttcctgtaagtctaaaactctctaaaaagtaaagttggttgggtgcagtggctcatgcctgtaatcccagcactttgggaggccgaggtgggaggatcacctgaggtcaggagttcgagaccagcctggacaacatggtgaaaccccatctctactaaaaataaaaaaattagcctggcatagtggtgcgggcctgtaatcacagctacttgggaggctgaggcaggagaatagcttgaagcccagagggggatgtttggtgagccgatgtcacgccactgcactccaacctgagaggcaagagtgagactccgtctcaaaaaaaagaaaaaaagaaacaagtctattaagttaaacctatacacacagacacatatataagtatatagaaagcagtgagtggctggcaaaatgtaaaacaaatagtgaaaagaatatctaggattttttttcctttttcttttttttttttttaaatatttttaccttatttacaattaagaatttttttttttttttgaggcagagttttgctctgtctcccaggatggagtgcagtggcacgatctcacctcactgcaacctctgcctcccagctgcaagcaattctcgtgcctcagcctcctgagtagctgggattacaagcacccaccaccattcctggctaatgttttttgttttcatttttttttttttttttgtatttttagtagagacagggtttcatcatgttggccagtctgatctcaaactcctgacctcaggtgatccactcacctcagcctcccaaagtgctgggattacaggcgtgagccaccgcactgggtctatttgggattttttaagtgtcttgttttttagttggatatcatgttaaagataaaatttagaaagttttcatttcattcttgttagtgtagcaagaaatttcttttttaaatttatttatttatttatttatttatttatttatttatttattgaggcagagtcttgctctattgccaggctggagtgcagtggcatgatcttggctcactgcaacctcctcctcctgggttcaagcaattctcctgcctcagcctcccgagtagctgggattacaggcacctgccaccacgcccagctaatgtttgtatttttaatagcggtggggtttcaccatgttggacaagatggtctccgtcttttgacctcttgatctgcccatctcggcctcccaaagtgctgggattacaggcatgagccacagcatccagccaagaaattctttaaaaaaaattttttttaaaggaaatttattcttgggaaatgcttgggaaaagaacatttgatcttatctattttgtttcacaatatgataagcagaattgcaatgttatgtgctatctacagattatttagtaagacattgatctgtctgtgaggaacatcgatctcatccagaaaaatgtcttagccaagatgtgtgggtaatgtcctaaccctgtatagctctatgctgattgctgccccctgctgtccttgtcctcttgccgaaatgagatggggcaaaggacataggtcaattaaatgccctcttaacgcagcctttcttttacattcttgtggctgtcctgttgtcccttaggtgtagagaaggcatgcgctttccaggaactatgtagtaaacagtacccaaatggcctgcaaggggtatcgggccccttgatagggtcttggagaacgtctctgtgatcaacttgtaccagttatttgtatttgtttttaaggtcaaatacattcttctcttaagtgatttgcaggacagtgagtatagttctgaagttgagttctaaatcttggaacgcattcattttcctttcctcttttgcgattgtattactcacttcttgttttttggctgcaaatgtgctgggattacaggcgtgagccacagtgccagccacattttttctttttattgggaaggcatctcaatatgttgcccaggttagtcttgaactcatggcctcaagtgatcctcctccctcgcctcccaaacttctgcgactgcagacgtggtggctcatgccaggcgaatggttcagagaaaaaaagcatatcatcaaaatagatctgcagaagcaaatcaagtatatatcctgctaattgactgtgtttaagaatgcaggcccatgttctattgaacctgcttgctgctttaaagcagggcttctcgaatataacctgtatttggattgcctggggatcttgtttaaaatgcagattctgatgagtaggtctcagtgggacctgagattctacatctttgtcaactcccagctgatgctaacactgttagagaaagactacactttgcacagttaagggtctaaaggtcagaaagtgtgaacttattttattattttattttattttattttttgagatggagtttcaatcttgttgcccaggctggagtgcaatggcatgatcttggctcaccgcaacctccgcctcccgggttcaagcaattctcctgcctcagcctcctgagtagctgggattacaggcatgcgccaccccacccagctaattttgtatttttagtagacagggtttctccatgttggtcaggctggtcttgaattcccgacctcaggtgatccacccacttcagcctcccaaagtgctgggattacaggcatgagccactgtacctggccgtttttttttttggttttttttttttttaatttttaaaaaatagaggtagggtctcactatgtggcccaggctggtcttgacctcctgggctcaagtgatctgccagccttggcctcccaaagttctgggattacatgtgtgagccactgcacccagcttactgtgcttttgttgttgttttttcagtttttttttgagacggagtttcactcttgtcacccaggctggagtgcagtggtgcgacctgagcttgctgcagcctttacctcctgggttcaagcaattctcctgcctcagtgtcctgagtagctgggattacaggcgcctgcgccattctcagctaatttttgtatttttaatagagacagggtttcaccatgttggccaggctggtctcgaactcctgacctcaggtgatctgcctgcctcggcttcccaaagttctgagattacaggtatgagccaccgcacccggcctcctgtgtgtttttagatgggagttttcgatcctagaagctcagagaaggtgagatgatggcaccggaatggagctctcccaccctcaaggggaggactggttaaaagtcagggttcaacgagcaacgcccaggctgagtgctgggcacatgacagaagctgtgttctccacagagcggcttccgtgccagtcggggaacgctggagtaccaaactgcctttttagtcactatgaaattttgtttttagtttcacacattttccaaaataactagttctctttcctgttttgcagaggagttgtttccatggtcattttgaaaatgacagaaacccaagctggagaatacctactttttattcagagtgaagctaccaattacacaatattgtttacagtgagtataagaagtaagtccagcctgctactagtattccagcctggaataccacaatatttcaaaggagtggtttagaacccgttagcttgaccagctcctctagacatattcaggtttcccttgatacgtagttggattgattagattcctgtcaaccctctgtagaacctatagagaactgagaatcactgatgaatcactgatgtgtgccgtgggctctcagaatgtgactgctgctaaaaacgcctgggacgtcctctgttcagtagcagatggctgacagggaagaaatggaaaacattttgaccttggaatcagaagacctctgttctaattctggttctgatactaccacctatggcaggtcacaatttctctgagccccgatttccttattggtaaaatgaggataaaaatacgtacctcacaggattggaaggtctcagcgtgatccaatagaactttctgagatgatgaaaatgatcttgtctgttctttccaatacagtagccactggccacatggggctgttgaacacttgaaaggtggctaaggtgactgaggaactaaagttttaattttatttaattttaatttgttaaaattggaatgtaaatagccccatgcagctaggggctactgtgttggacagcgcaggcccacatgcgtgctagaccatatgcaaactgtaaggaacggtccagatgttctgaccaagggaggcagctgtgcagttggcagaggcaccacctgcgtgtgctttctggcttctccttgtttcgtccccatcatgcacagactccgtgctatgcacactgaacttgctgcttcgccttccatgaccaagaaggactaaaggtgtctgcattcacttaggtcctcgtgcctttaggggccagtgcagtgctccaaaaaccctgggttaatatcacttgaaattaggtccccccgacacattgacacaacttgccaggctcccctcttccttgtcagtgactaaatgtccggcccacagaggtgccctgggtcaggagtaaccacaactgccctttgctgaagatcttctgcctgtttcatctcagatgctcacagcgatcctgcatgcatgtagatgagaaaacagcccctctgagaggtgtggtggtgggcacagctggaggctttctgcaccacactgccctgggtcttgtgtgagaatgtgtgggtcttgctgtcaaagctactaacagaagagagcacgcaagagtcccagaagcatcatcttactggggttgggggtggagtaaggttctaaagtcagcctgtaaggtatacatgagctaaagtcaaaattacccaaaatttattctggaaagtcctttaattactctgaaaatgataggaccagagccctacaagctccaaagccgagaatcaccttatgttgctctttaatgtcggtcatgttccctgccccctttctagtccctcaccgcctctgtgggacagtaaatacgtgccccaggttggatgaagctaggacgtttcttgttctctacttctcttcctctttctccttttttctctccttttaaaattttcttgccaagtataaacagttgtataaggtaagtgggcatctgctgtgtctctgttatacttagggtatattcctttcacttaagatttacaatgtaaaaatgtaacaacagttattcaggtaaattataacttatttttagcattctgcaaggtggtgggatccaaaaaataggtgggagagatgtggcaacagtcagtgtgaaaaagaggaaagggtttagtcaaccacaagctcagtattaaccaccagcgtggcatggttgccaaaaaagtaaatttgaaccttggcagtgttcatgaaaatataacgtctaaattaaggaaattaatagaagcttattcatttcagttctacttttttaaagatgaatactgacaaaatgagcaaccaggatagtggaaaacttggaattctttaaattaggagcagttgaaggaattgggaatgtgtagtatatagaaggaaatgttttgaggagacgataagattgattgcagtgtaatgcagaggaaattcttttgggatttgagtcaggaaacctgagctaactagttaaagtaccttgtatggtaattatctcccttgatctcggtttctgattttaaatatttgaaagattttcatatggaatcaaagctagactttaaaaaagttgctctagaggatatgataagaaccaattgttagaaattacagggagaaaaagtaaaaatcacctcaagatgggaaaaaatacttgcagttcacaatcaacaaaggattaatagtcataatatgtaaagtcaataagataaacaatctatataagtcaataagtcaataagaaaaacgaacaaaatgaaaacctagtagagcaatgaacaaaggacatgagtaggcatttcatttttggaacatgaaacctaaatggtcaagaaacatgttaaaagataaacttaggcacgttaaagttgtaaagagtatatttgagcagaaagcaattcatgaatcaggcagtaccagatggcaagcaggtgggctccagtgaggagattcaagggtaagacttctttctataatgtgttcccggaagcaagacaaagaaaaaatttgattgtttaaagaaggacagtccctggattggtcagtttgcagttcctcattgattaagctaagttgcattttgctgctcatattgaattgggtttgttttttgctttttgttgttgttgtttttgtagagacggggttttggcatgttacctaggctggtctcgaactcctgggctcaagcgatcctcccgcctcaccctccctaagtgctgggattacaggcgtgagccaccttgcccggcctttattcttttcctttttttttttttgagttgtgttgtgatttgtttacctaggaactcaagctgttagagttgtctcagcctaatggactcccaattaattattttaacacatgttaaattaataatggagaaattaaattaagaccacaatgaaataccattttatacttgctggattgctgaaaattaagaagtcttggtaagtctataaagcaataggtgctctcatatcctgctgtgtaacataaattagtataaccactttggaaaacaaatgatcattatgtgtaaggctgaatgtgctcataccatgtagaccagcagttccactcttaagaatgttattaaggaaactgttatacacatgcctcagtacaaatgtgtagaatgttcagagcacatggttgatcatacaaaaaactgtggccgggtgtggtggctcatacctgtaatccaagcactttgggaggccaaggcaggaagatcacttgagcctgggaggttgaggctgtagtgagctgagattgcaccactgcactccagcctgggtgacagagaccctgtctcacacacacacacggaaggaaacaacccaaatgtctactgcaagaaaatgaaaaaataatgatatatttaccaatagaatattatgtagcagtaaaaaaaaaaaatgaataaagtatagctacatgtaaaaccatggatgaattttaaaaacataaggttggatgaaaaaatgaagttgtagaagttacatattgattgataacactattttgaagctcaagaatgaaaaaatcaatatattgtttagtgccacatatttatttggtataactactttgaagagtcctcgaataatcaacaaaattcaggataaaggatacgtgcagttgagaggtggggagaagcataaaagtagatcaaaaggtatttattaatattctagttattaggtggatagtggctccgtgggtatttgttgttgttatgctttgaaatttacactccatatattctttcatatatatatatatatatcaaacagtacatagtattttcaaacaaaatttattgtaaggagagaggctggaattcagtatagggaaactttctttaaaaaaaaaaaagtttgtcagaaattagaatgacctgccctgggaggtcatgaactccagtctctagaagagtcaaagtagaagtagaaagtttatgttagaaatagctgggagtgaaggatggtgtgtgtgtgtgtgtgtgtgatccagggtgagtgggaggctcaactaaacctcttaagttctgttgcaattccaactccaccctaccatgtttcttctgtctttctaaatcttagtatatttctgcctagttgcagatcaaattataggaagaaagttgaggtctaaactatgtgttaaacaagggtttaagccatatgttattgctaatttcctttttcctgtgcctatcaatatttgtattttcacatggcttcactcgactactttagttagctgtggatttgtgaaatacccaaagaaattggccaagaggagaaatgttcaagttgacactgcagccacagctaaatttaatataatggttggtttgcttttgatgcctttattatgaaaaaagaaaaaaatatgtatacgtaatggttgagaacttttcataatgacatagaatccttttctgaggggctgctaagagaattatttttaaaatagtaaaatgttaataacttatgatgctttagataccctgctttacacattaagaagaccttactttagaaaaatggaaaaccaggacgccctggtctgcatatctgagagcgttccagagccgatcgtggaatgggtgctttgcgattcacagggggaaaggtatgacacatccatggtagctgctattctcataatttccttttggcctttttctaatgtagttgacatcaagctgtatgtaaaatttaatttatgctcatttaaacaggaaactttggcttcttaaagttaaaaaatggccagtatagggccgggtgaagtggctcacgcctgtaatcccagcatttcgggaggccaaggtggacagatcacttgaggtcaggagtttgagaccagcctggccaacatggtgaaaccccatctctactaaaaatacaaaaaattaactgggtgtggtggcaggcacctaaaataccagctactctggaggctgaggcaggagaatctcttgaacctgggaggcaaaggttgtggtgagccaagatcacgccattgcactccagcctgggcaacaagagcgaaactccgtctcaaaaaataaataaataaaattaaaaaaataaaataaataagtaatacagaatggccaatgtgggcttcacagggaggacaaggatttttttggtaaggggctttttggaacccctcaaatcaactgcagggcccttcctgggcatcatgctacacaagtaaaagtccctctacgttccaggattgttggctccctgggcatctggttggggcaaaaagaaagatactgattttaaagtagaattatcttataagtaagaaattctaggctgggcacagtggctcacgtctgtaatcccagcactttgggaggccaagaccggcggatcacgaggtcaggagatcgagatcatcctggctaacatggtgaaaccccatctctactaaaaatacaaaaaaaattagccgggcgtggtggtgggcacctgtagtcccagctactcaggaggctgaggcaggagaatggcgtgaacctgggaggcagagcttgcagtaagccgagatcgcgccactgcactccagcctgggtgacagagcgagactccatctcaaaaaaaaaaaaaaagggaaattataggctgggcacagtggctcacacctgtaatcccagcaatttgggaggccgaggcaggcagatcacctgaggttgggggttcgagaccagcctgaccaacatggtcaaaccccgtctctactaaaaatacaaaaattagccaggtgtggtggtgggcatctgtaatcccagctactcaggaggctgaggaaggagaattgcttgaacccgggaggcggagattgcagtgacccgagatcgcgccattgcactccagcctgggtgacagagtgagactccatctaaaaaaaaagaaaagaaaggaagaaagaaattccttgtgacaaaatgtttaatttctgattatcctgtttgttctgggaaagcagtctaatatgattgtttaaagatatagaatccagagccagatagcctgggtttgaaccctggtttgcttagcagctgtgtggccttggacaagttacttactctctgtgcctcatcagaagaatgcggatgacaacagatacttataggattgctattctgattaaatgaattgatatatgtaaagcacatagaacagtgcctagccaatactaagtaaggtataaatgtttacatagtttttcatatatgccaaagttaagttcttacaaagtaaaaattcatgcagtttgaactaattaaaatttactaaacaactttttttttttttaaaataggaccaaatagaaggagaaaaagtaccaaatactttgttccaaagtggtacaaaagttcgctttctgctgaggcagggagaggggttttgctctgttgaatacttgggagtcttggctgacttcccttgtgggtgacaccttggccctcctctgttcctatgggaactcgggtgacttttgaaactttagcttccccctcccttactgcgtcccaaaaggatgcttaccttgctaaacttcatgaaagcccaatcatgctttttctcttctctctttcttctctttttttcctttatcttctttctcatttttttccctttctttccctgtctttaaacaacagcaacaaagagatcaccaaacatgaacaattttaaactgttttgttatgtaattctccttagtgttatgctaattcattgcgataatgagtaactagctagctcccctctgagctcttagctgaaaccatagatatgggcttgtttaccttttgaccttttgtttaccatttgacccttaaaactggctctagaactttgttctcctcttgagcattcatttgtaattttaaaacttgtttagccaaatggtacttcttttctaattgcagctgtaaagaagaaagtccagctgttgttaaaaaggaggaaaaagtgcttcatgaattatttgggatggacataaggtgctgtgccagaaatgaactgggcagggaatgcaccaggctgttcacaataggtaacactataatatcatgcactttcattttcagtgaccggttcttagcaactatcagggactaacagtaactgcgtaggtgatcattcaacttcagaaatcctatcattccttcaggtcacagtaaatgcaatattatggattctgtaaatgctgatttcttcataaaagaggagtcagtctctaaaagcttcttttattaatgtggttagtaatatttgagatgatgctaaagtctttgttcagaatgttcaggatatcttttgtgatgaggcaaaaatcactttttttttctcacttgggatgttttcatctcctagatctaaatcaaactcctcagaccacattgccacaattatttcttaaagtaggggaacccttatggataaggtgcaaagctgttcatgtgaaccatggattcgggctcacctgggaattagaaaacaaagcactcgaggaggtaataggacaagtttgtattctgaaaatgcaggaacaattaactaatagtctggattgaaaacattaaatgcaaactctgttttattaaaacctagggcaactactttgagatgagtacctattcaacaaacagaactatgatacggattctgtttgcttttgtatcatcagtggcaagaaacgacaccggatactacacttgttcctcttcaaagcatcccagtcaatcagctttggttaccatcgtaggtaatgcaggctgctcacacaatctttattcctatttttagtcgctgtagtgtggaatgtgaagtatgtggtacaaattctgatttcaatataatgctactatcaaacactaagaaagaaactgagttagaatagctttgcaaagataatctgcccaccctcttccttttcccgttaaaccaggctcgcttgaatgccactgtctttgcatataacacattgtaatatgaccatctgtttgtgtacttttatcctccagtagactgtaagtttcttaaggacaagaacaactcattctatccttgtagttccagaacctgacacagagcctgacacaaaaaggacaataaatactagttctaagaaccaactaaccgcactgttagggcagtgagcactgagagacagtacaagcccttagatgcactgaaattttggtggggtatgtaggatctgaaaataaccacagttcaataatctcagattagggcacagcgttcagccataatgaaaatgccgagaaatacagcgatgctcttagcagattaataaggaagtgttccataaggcaacctcgtgaatattgctagccagattgctcttttatttgtgccttgagtttattttactctctctcatcaatggaagagtggtgctggctgagagcaggggccagacagtcaattatctacatcccattctttttctttccttctttctttttttaaacatttcttaacttcgaaagatgatgagctcaggcttagaactagggataggactcctgggttttcacttggattatccaacctgacctgcagcatgccaacacttgagttttcctgtgttaaactgatgaatacaagtttattttatcttctcaatacgtttccctatgaatattattaactaactcataaatgcctattttttcttacagaaaagggatttataaatgctaccaattcaagtgaagattatgaaattgaccaatatgaagagttttgtttttctgtcaggtttaaagcctacccacaaatcagatgtacgtggaccttctctcgaaaatcatttccttgtgagcaaaagggtcttgataacggatacaggtgagaccacaaaggactctaagataccatttttagcataattctccttgcttgttgcccttgagaaggacagttttatacttatggaagcaaattcacttatgagtttaactattattgagttgaaattggagataagaaaacaataagcagatgtgaggatacagtagcagtcttaccattactttagataatataacctgctgcatgaaaacagaaagaaccgtattagtctggtctagtttgagtctggttctctggcattttctgagtcacaaggtagtttttacttcctgtttgagagtgcggtgtgtaggacactgagtctcccctaaaacatttgcagatgattgaggaagtaaaactccttaaaaacagaaaaacattactcataggtgtattgatttaaattttcaaaaaatacatgcagaaatagcccaatagtaagtgctgaaggaaaatgttgttttcctcgggatttgtatgagaaactatgcaagattcttttttttaagaacaacaaattttcttttctttttctttttctttttttttttttttgagatgaggtctcactctgtcacctaggctatagtgcagtggtgcaatattggctcactgcaacctccacctcccaggctcaagtgatcctcccacctcagcctcccaagtagctggtaccacaggtgcacaccaccacacctgactaattttttgtatttttggtagagacagggttttgccatgttgcgcaggctggtctcggactcttgagctcaggagattcaccctacctgggcctcccaaagtgctgggattacaggcgtgagccactgcacccagccgaaagattctcttgtgggaggaattctccattccttctttggaaaacaaaaaacaactttcccctatatcttctatagttatgacatctcttgtctctttaaactaatgctatggaacatggttttggactaggctatgagacactgagacgcacatgttatctttcaaacaagtcaatggactagaataaatcatcctttctcagcatgtggtctgttgaacaactgtgtaagaatcatctgagcaaatgtttaaaatgtggattcctggctcccattccagacatgctgactcaaaactggggcaaaacgctcagactctgcttttttaatgagaacctttggtgattcctatcacaggtctagatctgtgctgtccggtacggtagccaccagccacatgtggctattgagagcttgaagtgtgtctggtccaaattgagatgtactctaattgtaaaatacacactagattttgaagacttagtatgaaaaaaagaatgtaaaatatattattaataatttttatattggccgggctcggtgggtcacacctgtcatcccagcactttatgaagccaaggcgggtggatcgcttgatcctaggagtttgagaccagcctggataacatggcaaaatcccatctctacagaaaatacaaaaatgagttgagtgtggtggtgtacacctttagtcccagctacttgggaggctgaggttggaggattgattgagcccaggtggtcgaggctgcagtagccatgatcacgtcaccgcactccagcctggatgcagagcaagaacctgcctcaaaaagaaaaaataataataaaattaaaacaatttttacattgattatatattaaaatgatagtattttggatatatcgcattcagcgaaatatgttattaaacttaatttcacctgcttccttttactttatacagccaacagaatttgtaaatgatgtacaaggcttgaagttgtgactcacattctgtttcattggctagccctgttctagatgaagagtaggagttcttttcaccttgattccgctaagtgtttgtttcatgattattgttactctttatacctaaaagggatttgtactaaaagtcccttgttgggacttttagaatctcagtgcagggtttgcatggagttgtctactgtctcttactgaaaccccccaatgttcagagcattcatttttaaagtaattaagaatgcagactggtctgggagctgactgaaacacactcccccaaactcagggtttgtcaacagtggcgctgctggcatgttgagctggataattctttgttgtgaaggactgtcccgtgcactgtaggatacttttcagcatcccgggtctcctcccactggatgccaggagcacattcccttttcccagtgtgaccaaaaatatctccagacactgccaaattgagaaaaataacccctggcattttttttttttttttttttgagaaccattgccttagaggcatcaacccacagtcatcgtaagctgttattcagaaatatcaagctttttttttttttttgagacagagtcttattctgttgcccagactgaagtgcagtggcacgatcttggctcactgcaagctcctgggttcaagcaattctcctgcctcagcctcctaagtagctgggattataggtgcatgccaccatgcccagctaattttttgtatttttaatagagacggggtttcttcatgttggccaggctgttctcgaactcctgacctcaagtgatccaaccgcctcagcctcccaaagtgctgggattacaggcgtgagccaccgcgcctggcccatcaagcttttaaatgtagaaggttggagagtcagcccctctttaccctagttgacttgattaccacttggcctgtgttcagaaggaaatcagcatatcactgtcccctctctcctttgtatcctatccccatgttagataagctcttagcattatgggaatctcttctgaacctgattcaaagagagaaggggtcgattcaatttagttcaacaaatattactttaatatcctcttgatgggtgtgatgctgtgatgggctgcaagagtgaataaggtaatgttgctttccctctcccgcaagaatgtacacagattgctactgtgctggtgatatctggtataaccttttgagattttacagaatcgccagttggggaccatgtcactgacatatgggtcatgggccaatgtagtgggctgcttcatgtagtttcattccatggctacaatccatacccatgaccccagattgttatcctatagaggtagccaaatgaatgaattaggtgagctcctgactcctatagcgttttgtacctcactcattcctacttatctggcaacagataagtatgtatgtcacatctcaccagggagtttataaactctaagaataggtatgctgccatatttctctatctttgtacaatgccttgttcagtaagtgtgtttaataaatgaatgaattcatcatcatatctggaatgcaactcacagtgcagtctgggccaaagatgagtcgacagcatcctcttcactgcaaggaccacgcacatggttcttagcacaacacccagtactcagtgtttattgttatttgaaagttcttgaagagctacagtgtttgtgctaatgatgtgcattgttggtactgataatgtaccaggtgttatgggccactgacgacacacagcaaaggaaagatgggccctccttcttcatgagaaaacatgctcaaagtactgaacaagaaacgaacaacacaaaatttgaacacgcctctgagtgctctaaatgtctttttctctccacatgaggctctatgttgagatggggatggaggactagattatagtcaggggtaatttccacttttctttgtttttgccttttttttttttttgagacagagtctcactctgtcgcccaggctggagtgcagtggcatgatcttggctcactgcaacctccgtctcctgggttcaagtgattctcctgcctcagcctccctagtagctgagattacaagcatgtgccaccctgcccagctatttttttgtatttttagtagagacggggttttgccatgttggccaggctggtctcgaactcctgacctcaaatgatacgcccacctcggcctgccaaagtgctgggattacaggtatgaaccaccgcgcctggcccttctttttgcttttttttttgagacggagtctcgctctgtcacccaggctagagtgcagtggcgcaatcttggcttactgcaacctcctcctcctggcggaggtgattaagtgattctcctctcggtggaggtgagtaagtgattctcctgcctcagcctctcgagtagctgggattacaggcatgcaccaccacactcggctaatttttgtatttttagtagagacggggtttcaccatgttggccaggctggtctcaaactcctgacctcgtgatctgcccgccttgccctcccaaagtgctgggattacagccgtgaaccacctttcctggcttctttttgctttttagagtcagggtcttgctatattgcccaggttggattctaactcctgggctcaagtgatcctcccgcctcagcctcctgagtagctgcaacttggcgtgtgccactgcacccgtctttccttttgactttttattatagaaagtttcaaatttactaataagttgaaataatagtgcatgagcattctttacctaccacctagattcaacaatttaattgaaccgaatttggtttgtgaagtacaatattttagtcatgtatcaagattttataggcaaagtgatacaattttttaaaaatctgttactgaaaggcccctgtaataacactacccctgaaaaaactttggtgtggtcatggtatgtgcaccagaaatctctcggcttccccactttcatggcttcatttctccaatttacttcctcaaatattacgccaaagtttactagggcttgcctttatgttttattaaattataactttctagccgtcctggtgtcctggtcctgataaaggtttccaggatatttcacccattagtttgtataatttcctatctctacagacttaattacaaattccaaatctaccttagctttttccacttttatgggaaaaaaaaaaggaataggactgttgtaattacttagtaacctcttctgaaaccttctccttagccttgcctaagcctgatgttttcctttttcctgaaatatttaattttccaactctgtgaatctaagttttgcccacagtaggcactaaccgagtgcttacggggtaaacagctgtgtggtggtcgtttgggttctgggtggtgagccagggtcctgctcagaagaaccacaaactgaaaagcaggctgtcacatacaatgagtgacacacaattgcagaagattatggagcctgggagaggagttgtttttttttttttcctattttctgaaggagttgagccttgagcacagacagaaaggagggaaaatgagggaaaagtttgagtctagagaaataccagcagctcctacctaaatgccgttcccattcacttctgcagtttgagacaacattcctggctgcaggtcttcccaagaccccactcagttgtaagttattaaccacatcttaagaagccattctgtgagaataaaagatccttctttgagctcttaccatgtgcaaaatcctataggtgtattacctcatttaactctcataatcccattttatgaaatgtggaaattgaggctaaattacttgcccaatcacagaaggcaaagccaacaccctttattccttctttttttctgaaattgccttataaaaacacataattccacctccagagataacattgcagactttttctatgtaagcaccatgatagaaacatacaatatggatctttgtataaacatgaaataaggtaccatttgtaatctgatttttcacttaaaatatatcatgagtatctttctatattaataagtatgttgttatatctaccttattgctgtaatggctgcatagtattccacttttcagaaatttttattttaactaactcctgttgatgggcatcaactttacttttttttctttctctttctttgacatttttatttttattattattattattattattattattattattattattatttcggatggaggcttgccctctcacccatgctggagtgcaatggtgcgatctcggctcactgcatcctccacctcaagcgattctcctgcctcagcctcccgaatagctgggattacaggcgtgtgccaccgtgcccagctaattttttgtatctttagtagagatggagtttcaccatgttggccaggctgatctcgaactccttacctcaagtgatcctcctcctttggcctcccaaagtgttgggattgcaggcgtgagccatcgttcccagccaagaaaccccttttcttagttttaatgagaacgcatcttcttagacaccgaggtattgttttactgtaaactcaaatgtcctgacctccgtctcctgccggctggccatttgtagaaaacccctaggcgaaagaggaagctttgcatctcccaatcagcctaattagttagtccccttggaattcccatggggtcaggacacggttgtcattgcagttgtcattgtttccagggttaactgtcataagcatgaggaaaggcagtttaaagccattggatattcagttttgtgttcctgctatttatgtgaccaatttcatacttggagtttgttcagaagagtgaaaaatgtttcaagtgctatctcttctaaaccatggcaaaccacactctattaagacagcacaaaagactgaggaagaaaaatgtttacgaaacattttgctttggtctgcctcatgataagtaattgtactggtcatttctttttccactgaattgactggtgtctctgacatgctctctggtgagccacactggcttcattacctcctctcttctcctttttcagggtctttggccattgtccagagagaattacactttctctcttagaagctcacgtctttcttctcttgggccacttccacgccagcctcttccacactgccttcctgaggtcgggcactggcatggagctctgtttcctcttctcctccctagggttgtaatctggctttcccccaatctttctattgtttccacttcaccagtgatttcctccttgttgtccagaaataggtcaggataagaaattcccctttttgacttcttcagccttcttgttaacaaagcaaaagaaggttaaacaccttattcaatgctcagcatttttttttttttttttgagtccgggtcttgctctgctgcctaggctggagtatagtggctccagcaattcccctacctcggcctcccaagtagctgggaccacaggtgtgtgccatcgcacccagctaattaaaaaaaaaaattctgtagagacaaggtcttgccatgttgcccaggccgatctcaaactcctgggctcaagtattgcaccctcctcggcctctcagagtgctgggattacagatgtgaacccctgcacgcacccaaaggtcaacttttaactgcctgaaacttttgataggtcagagagatgaattctcttgttcacaatacacagtcagaattaccttggcttacgagttcagggcacagaacattggtgtcacacaaacgtgggctcaaaagctgcaattacgcagtggcgttttgtggattttttttgtagagatgggatctcagtagattgccaaggctggtctcaaacttctggcctcaagcagtccacccatctcagcctcccaaagtgttgggattacaggtgtgttttgagtcttggggaccaactgggattctcttctcccctttatcttctgtatccaatctagcccctgccatttctttttttctggtgcctctagggtttgctcttttctctcctttcccattctcctccattaaacaacgctccccttgtcatgctccgaaacctcaaatctgaacttttacttctcctatcacagaaacttcccacactccaactgcttattacccctctaccttcaccaccaaattgtaaattctgtgagaacagaaacccaattttttgaatttgctgttgtgtcctcaatttccgtcacaaacaggttctaacattgacagttgaatgaaggaatgaatgaacgagttcttggattgctacaactgcctttaaacttccagtaaacttttgctgccatcagcaggtgcatataaaacactcttcataggccaagccaccctgactcatacctgttatcccagcactttgggaggccgaggtggggaggatggcttgagggcaggagtttgagaccagcctgggcaacatagtgagaccccatctgtacagaaaaattacataaaataaaattaaggctaggtgcagtggctcatgcctgtaatcccagcacttttggaggccaaggagagaggatcacatgaggtcaggaattcaagacgagtctggccaacatggtgaaccctgtctctatgaaaaatataaaaattagctggctgtggtggcgtgtgcctgtaatcccagctacttgggaggctgaggcaggagaattgcttgaacccaggaggcagaggttgcagtgagccaagatcacgccactgaactccagcctgggcgacagagtgagactccatctcaaaaaaaaaaaaaaaagttttattgcaatgctcagggcagtaagcattgttgtagaaaataagtaatttgtatttttaaaatgcgtaattcatcccggcactttgggaggctgaggtgggtggatcactaggtcaagagatcaagatcatcctggccaacatggtgaaaccccgtctctactaaaaatacaaaaaattagccaggcgtggtggcgggcacctgtaatctcagctactcaggaggctgaggcaggagaatcgcttgaacccgggaggcagaggttgcaataagccgagatagtgccactgcactccaacctgggtgacagagtgagactccatatcaataaataaataaagtaagtaaataaaatactgttcatgatattctgctcccatgagaagcttgccgttcctcctcattgcagccctatgacttcccgtctggcgccttcagtcgctgctttgtctcctccttggatgccttttcttttgtcctctcatcaaaaccaactcatccgtgaggctccagcttgagctctacctcctctatgaagcccccgaacctttcccaccgacacagacctctgccttctttgatcatctgctggacttcagtttaatgctttaatgattccacttgtatgggtcctgtctatccacccggtttaggtatctttgaagataggagctacctactttttaggtcttttgcatcctccacactcctcatctaaagctgcgtccactctgactcaccttcctaacctgccaggcagggtctttttgttttttaaactttaagtaggctaggccgggcgcagtggctcatgtatgtaatcccagcgctttgggagtctgaggcaggcagatcacaaggtcaggagatcgagaccatcctggctaacacggtgaacccctgtctctactaaaaaatataaaaaattagccgggcgtggtggcaggagcctgtagtcccagctactccggaggctgaggcaggagagtggcgggcacccgggaggcggagcttgcagtgagccgagatagtgccactgcactccagcctgggagacagagcgagactctgtctcaagaaaaaaaaaaaaaaactttcagtaggctatgtggaggtcgagttagatatcttcggtacaagccttagatttctttttctgttttaagggaatttttttctttttctccaattttgttactgtgagttcacgaaggcatattcaacagctcattgctgccctgcctctcctgcaccatccaacatctcactgcagtatccagcaacccacaggcctgctgggcgtggtggacagtccccaagatcaggttatctgtgtcaaaatattgagtggttgatgagtgctccaagtaggcactagagcctgctgagagcactcagaggtttctgcacaagctcagtggatttgagccctcatcgttgttcattgctatgtaagtcaagggttggtcataggtcctgccttggactgtcatttcaggaagcagggcagctacagcagcagtccccaacgtttttggcaccaaggatccattttgtggaagacaatttttccatagattgggggtagggggatggtttcgggatgaaactgttctatctcagatcatcggggattagattctcttaaggaacgcacaacctagatccctggcgtgtgcaattcacagtggggtttccgctcctgtgggaatctaatccctctgctgatctgacaggaagcggtaaagctctcttgcctgctgctcacttcctgctgtgtggcccctttcctaataggccatggacagttaccagtctagaggctggggggctggggacctctgaactacaggcttctccacctgcacaagttctgagaagttagactatccagagcaagaggggcaggaacttcctggtctcactgagaatcttcggccaatctcaactcccaatgggcatatgactcacacggtgatcatcttaaaatgcagattctgagtcagtgatttgaaagggacctgaaatcttgcaattgtaacaagctcccagatgataccaatggcgatgttgatgctgcctgtctgtggaccacactttgagtagcaagggtctacaatatggacatttccttttccagtgaactttagcaagtgaggagcatttcaaggaagacacctcccatgcacactgtcattagttgcagcatctcctgtagcaattgggctaaatctgtctttaattctttttcaaacagcatatccaagttttgcaatcataagcaccagccaggagaatatatattccatgcagaaaatgatgatgcccaatttaccaaaatgttcacgctgaatataagaagtaagttaaattgccgagaatttgatttttattttttaattccttaattttttattagtcttaactaggaaaagttaagtaatggcttagaagggctactacaaaactgtttttgtacgctgaagtgttttgaaactttactctcatatctactggcattgatcatatatctctttattttttatgttattttgttctgtttcatttttaagaccaggtctcactctaccacgcaggctggggtgccatggcacaatcatagatccctgtagcttcaaactcctgggctcaagtgatcctcctaagcctcccgagtagctgggactacaggcacgcgccaccatgctcagctaattttaaaaccatttttgtagagagggggcctccctttgttgcccaggttggtctcaaactcctggccttaagggatcctcataccttggcctcccaaagtgctaggattacaggcgagagccactgcacctggccatatatctctttctgtgtgtatcatcagaagctgaaagacttatttcacattgtctctgaatatgaattagtgttatgactttattgattttagtattttgaaaggtcatgttaaggaaaggctgaaagtcattttatctctcatttatttgtttttaataattttcatttctttggcttataaaacaatgagaagtccaacttctcctgaagctaagaatcattttaaggcatgcaaacaggtggaggtctgtacctcagctctctccagggagaggctggcaatggaaaaatggtgtgtagcagagaggttgcatggcaaggaggttgcatggcaaggaggaaagaagaaattaccagaggtctggaggcatcctaaatgagaaatcctcccagaagcacaaactgccctggagtaaatgggtagcctgtactgtaggcaactttgaaactatttccagaaagtaccatactccatgagcttattttattttattattttcagagacagggtcttgctgtgttgcccaggctggtcttgaactccttggcccaagtgatcctcccaccttggcttcacaaagtattggtattataggagtgaaccactatgcccagccagtgagcttatttcacacgttcttttctacagggaaacctcaagtgctcgcagaagcatcggcaagtcaggcgtcctgtttctcggatggatacccattaccatcttggacctggaagaagtgttcagacaagtctcccaagtaataaggacattgatgcctcttataatggaagaacataaaactctctgacctattgactctttcatgaatacggtttaggaggaaatgatgaaatatttaaaatgctaaccttctcaatcaaccataactctcaatagtcatagactgtttctgataacttatactggatgaatctcttttagaactcgctgcagaaatcctaacttccaatctgatgacagcacacctgtctaaattctttgccattttttttttcagctgcacagaagagatcacagaaggagtctggaatagaaaggctaacagaaaagtgtttggacagtgggtgtcgagcagtactctaaacatgagtgaagccataaaagggttcctggtcaagtgctgtgcatacaattcccttggcacatcttgtgagacgatccttttaaactctccaggtacaacagttgttcttgtgatattccaccatcaggaattccccactagaagttagtccccatcgctgacttttacttggggaattttacaggagagtatagggtcagtgtgtgagaaaaggtttcttgagtcaggcaagaatccccagagagactgtttcacaggttggggcggagtcctccctgtgcccttgtgactcatgtgtcacagtgaccgggagaagcagaaactgccggtgtggtgaatctccatggaaagatctaactctagagaaacagattttgtcacttggagtctctgtcattttcccttttgattagcctccttatttgccctcagcttgctgttttataatttttggtttgctttttagagccctcctaagttaaacagttgtgaaacctggctgcccaccctagtagttaggatcaccaacctcacaaaactgacttctccactttcatgtgcgaccttcataaaagggatatgaacttcttttttctctgacttgtacatcctgtaggtttaaatccatgcatttttttttttttgagatggagtctcgctctgtcacccaggctgcagtgcagtggcgtgatcttggctcacctctgccagggttcaagcgattctcctgcctcagcctcccgagcagctgggattacaggcacctgccaccacgcccagctaatttttgaatttttttagagacgggatttcactgtgttgcctgggctggtgtctaattcttggactcaagtgatcctcccatcttggcctcccaaagtgctgggactacaggcgtgagccatcgtgcctggcccagatgtaattcttgtaaatttaccctagtaaatggttttaaagaatggattgagaataatccgcaattttctagggaggaaatgtatcctttacagggacattgcctgattgtctgtggggagtagagtatatgtagagtggttgttaggactgaaaatgattattactgaaacaggatgtgagagattataatgagttgtccactatttataatgtcacacaggaattctgtttcatcgctgagtgacactcttttgttgcaggccccttccctttcatccaagacaacatctcattctatgcaacaattggtgtttgtctcctcttcattgtcgttttaaccctgctaatttgtcacaagtacaaaaaggtaaaagcaaaggtaaaaattcattattctttcctctatctgcagaactgcctattcctaactgactcatcatttcatctctgaagcaatttaggtatgaaagccagctacagatggtacaggtgaccggctcctcagataatgagtacttctacgttgatttcagagaatatgaatatgatctcaaatgggagtttccaagagaaaatttagagtttggtaagaatggaatgtgccaaatgtttctgcagcatttcttttccattggaaaatctttaaaatgcacgtactcaccatttgtctttgcagggaaggtactaggatcaggtgcttttggaaaagtgatgaacgcaacagcttatggaattagcaaaacaggagtctcaatccaggttgccgtcaaaatgctgaaaggtacagtatagtggaaggacagcaacaaagatgcccaaaaatgggaggcacagtttcccacccatgccttcttctcttttccatccttttaatggttactgtttgccttgtttcaaggctaaaaatggagtggattggggtgtcaacccagtcatgaatacaaaattcaagtcataaatacaaaactccacctcttcttccacttctctctttgtttatttttattttcttttatttttttgagacagggtctcactctgtcacctaggctggagtacagtagtgtgatcatggctcactgcagcctccaccccctgggctcaggctcctcagcagctggggctacaggcgtgcaccaccacgctcagctaagttttttatttttggtagagacggggtttcaccatgttgcctaggctgatctgggactcctgagctcaaactatctgcccgcctcggcctcccaaagtgttgggattacaggcgtgagccactgtgccaggcctatttagtttttataggctttgatatttggggatacagttgccacaggcagaagttctttcttacatttgtgttgttttattttgttttatttttagagacaggatcttgctctgttacccaggctagagtgctgtgatcatagctcactgcagcctcgacctccttggctctagcaatgctctcacctcagcctcacaggagtgtgccaagacaattggctaatttttttttttttttgtagatacggtgtctcaccatattgcccaggatggttgcaaactcctggctcaagtgaggctgccttggcctcctaaagtgctgggattacaggtgtgggttgaaacagactctgggtaggagagaaaactggggccctttgtatcctcacttcgttgctccatccattccgatctggcgtccagccccattgctggcctcaccgttaccaccgctgacccagcaaaagcatctccagctggctctcttgctaaggtcaacagtgacttcaaaccaaaccaagcctaatggatatttttcagtcctcattacttgattgttcagcatgaattgatgctgttgattcttctctccatccagaagctttctttctttgggttttgtgtcaccatattctggttttcctcccacccctctgcccttctcagtcctttgtgggctcatcttcttccatccagcttttgttgttgtggctgattttgaaactcagtcctttgtgggctcatcttcttccatccagcttttgttgttgtggctgattttgaaacacagccttgctctgttgcccaggctggagtgcagtggtgtgatctcagctcactgcaacctccacttcccaggctcaagccatcctcccacttcaggcccctgagtaggggggactacaggcatgcgccaccatgcctggctaatttttgtatttttggtagagatggggcttcgccatgttgcccaggctccatccagctttttatggggcatccctgtgggcttgctcctggaccgccttgcgttttcgctccacacactcaacacagtccatccccactacacccgtgatgtcctcccatacaccaagggccctcatgcttgcgtctcctttcggagcttcaggttcatatgttaaatgtttggatgtctcaaaggtccctttaacacagtgtatgcaaggtgaattcccctaaccctggccctgcaccagcagtcctctctgtgactggtaatgaatgccagtgaataaataaccacattctatatagttgggcacactagaaacccgtgacttttccttgacaccttcctctttctaacaccctgtgagctaatcctatcaggtttccgattagtgtctcttgattccatcctcgtccctccatctctatgaccaccactctagttcaaggctctctcctggacaaaagcttccaaagcaggttcctgtatccactcttgcctccctttggcttctccatactgaggtccaagtgacagtggcgaaaggctaagcagatcaaatggctttcctacttcacatttcctccaccacccgcatggctgggccaccgctgcctccccacctcttgctctcggcaccccagagcgctggccttctttcagttcccccagcactgtcctcccacccactgtggggcctttgcacaagtggatccttctgcttccccttcccctttcatgtaagtatctcccactgccccctcagatctcagcttaaacaccacttcctctgtctcacaccacagacaatattgaggcccttgcaatgtgcgacattagctctctgcaggctttcccccgtagaatccatcacctttgtcatgacattttttaacatccaattgttgtcccatctgtccagtagcccctgtgcctcatgagggcagggtctgtgtctgtggtgctgtgctctctcctttctcgacctttgcccactctttcacaaccctcagcactgttctcctccccttccaccatgagtcacctggccagctcccatttttcttcaggactcagtttagacattgaatgctcctttctccacccctccaaggctaaggtagctatcccttttgaccctacagtacccctgcactcctttgccacgttgcattttttcttttttttttgagacggagtctcactctgtcgcccaggctggagtgcagtggcaccatctcagctcactgtaagctccgcctcctgggttcacgccattctcctgcctcagcctccctagcagctgggactacaggcacccaccaccacgcccggctaaatttttttgtatttttagtagagacagagtttcaccgtgttagccaggatggtcttgatctcctgacctcgtgatccgcctgtctcagcctcccaaagtgctgggattacaggcatgagccaccgtgcccagcccaacgttgcattttttctttttctttcttttttctttttttgagatagggtctcactctgtcacccaggctggagtgcagtgaagtcatcatagctcacggcaagcttcaagtcctgggctcaagtgatggtctgcagcctttccagtaactggaactacatgcaggcaccaccaagcccagctaatttttattttattttattttatttatttatgtatttttactttattttatttttaagtagagacaagctcttgctattttgcccgggcctttcttgaacttctgggtaccagcaattctcccgcttgtctcagcctcccaagatgttgggattagacgcgcagggacccacgtcttgcctgccgtattgcatttatggcactgtattgtcatggcttatttacttctctgccttctccaggagactctaagatccaggaagacaagggttgtgtcttgtttttccttcattccccagtgtctaggacattggctcttacagagtaggcactcaataaatacttgttgaatgactgaatgaaagaggtaatggtacatgaaaatgcttagaagaagctaagcatgctaaaaaatgtaagatattattttagccatgaggaataggacatgaacaagtaaagccccgaatccctgtccagcgtgaagctgaagacatgatgtattagggggtcccagtgcccacaggaaatcccacccccaagctaaaatcttggaaacaaggatacccctgagagcttgcccaaaccaaaatagaggatgtcagcaccggagaagccactataaaggttaggatgccttcctggacaaaataatggaacctggcaatcgaaccaaatcttcactgaatgtaaagaagagttactatatctggaagaaaaagtctgttcacagaggggtggtgcctggagcctggagagggaagtccagagaccctgcccttgcccctgtggctgcccgggctgccctgaccaactgcacatgagccgcaatgacgggagcccttggattccatagcgactttcctcacactgtgcttctaagtcagcttataagtacagtttgctgagctatctggaattttccctagagagagaatgcattggccaaccaatatgttctagcctgcttggcagttttatttctcaatgtcaattaatgggtctcttgagcacctgatagtgggaattagtcctctttgaccttctcccattggacttgctggcaaatctaatgttctagacctgagggccacaggctagagtcaaccatgctcacgacactgttatctctctctgactacaacagatccaagagttcaaacaaacaaacaaaaaggacgtttctcccttctgttaacttgtactgaggaggaaaagcatgtgttattattttgtttgtttgttttgagggccaactgtaaggatttttattttggtaggtagaggaaagtcctgttgaaaggtgcattaccagattcaacatttatactatagtctttgttttgttttgttttgttttgtttttgagacagagtctcgctctgtcacccaggctggagtggtgcaggggctcaatctcggctcactgcaacctctgcctccccagttcaagggattcttttgcctcatcctcctgagtagctggaattacaggtacgcaccggcacgcccggctaattttttgtatgtttagtagagacagggtttcaccatgttggccaggttggtcttcaactcctgaccttaagtgatccacccgccttggcctcccaaagtgttgggattacaggtgtgagccactgcgcccagccctatactacagtctgaattctgccttaggctgggcatggtggctcatgcctgtattcccagcactttgggaggcggagttgggaggattgcttgaatctaggagttcaagaccagcctgggcaacatggtgagaccccatctctacaaaaaatataaaaattagctgggcatgatggcctgtgcttgtagtaccagtaacttggagggctgaggtaggaggatcacttgagcccaggaggcagaggctacagtaagctgagatcatgtcactacactccagcctgggtgacagagtgagatactgtgtcaaaaaaaaaagaaagaaagaaaaggaaaaaaaaaaaaagaaaaaggagaaattctgtcttaaaacacaggatattgtttgtttgtttatttatttatttattttaagatggagtttcactcttgttgcccaggctggagtgcaatggtgcaatctcagctaattgcaacctctgcctcccacattcaagcgattctcctgcctcatcctcccaagtagctgggattacaggtgcctgccaccacgcctggctaatttttgtatttttagtagagacgaggtttcaccatattggccaggccagtcttgaacttctgacctcaagtgatccacccacctcggcctcccaaagtgctgggattacaggcatgacccaccatgcctggcttctctcataattttgaatttaaataaataatgcagattgactctgagctgagaaaaattttatttaatgacataaaattcgtattttacttgagttttacatttttaatgctcctttctttgacagaaaaagcagacagctctgaaagagaggcactcatgtcagaactcaagatgatgacccagctgggaagccacgagaatattgtgaacctgctgggggcgtgcacactgtcaggtaacccacttccacgaaaatcacctcatcaaaaagactgtagcttgatgacaaagaggatgtttgctctctctctctctctctctttttaattctttgtcttttctcagtcacagtgtgaactctcaaacccaagtggaattagacactgagcactctataaatcagaggggtcaaaataaagaatgcctcattcatctgctttatcgtgatatattgcataattctcacctgcttaaaaacaacaacaacaacaacattgcaagtacatttggtggtgtctgtgcttctctcccagcttggaagctggtgcacaggcgtggtgagagtggttacagagcctggccactgccccagttgggctgccgtcaaatacggcacagcctagctaggatatcagactttactttcccagaattctctggggcatgccctctgatcttctctcttctgcctagaaatacccaaatgatgtgcccaaggttcattctttctgcagcagcaggcctggggctggtactaaaaggaaaaagaggaaagtgaatctgagagaggactgggaatatatttctccctcctcaagcaaacagcaaatcagcatatagttaccaagtgttcacctataatacacagctagaacattactttcagttgccaactggagaatccaggaggccagtggtattggtgaggccacacatacaaaaaagggccacagagaatgtcaagaagatgctgctttccaaagaaatttgagcaaaagctgaaactgaatttaaagtataagaagagctaggctcagaaaaagttgtactgtccccaagtcagcagagaaccaagccctcctaagagtatgttgtctgctacatagacttctgaaataacagtttgctttgtgtatgcctataattgaaactgtaactatttcaggaccaatttacttgatttttgaatactgttgctatggtgatcttctcaactatctaagaagtaaaagagaaaaatttcacaggacttggacagagattttcaaggaacacaatttcagtttttaccccactttccaatcacatccaaattccaggtaagaggctgggtcagggtttcgtaattacacatcatagaacgtaggcaaagtgtgctgttcaaacacacttcgttgaccagtttctaaaggcaccgtgaagtctgtgggtcctgcaacctagagatttcctgaatctttgctatagtttccctgttgacatggaacgagtcctgtccctttccttcagtacaggtactatagctgagctagtctctctccacccatgcctgcatcacaccatagacgcctatttggtttggggaaaggtgcattattcggtctttcaggacacctggttgcctcacaggtattggtagaaagaatgaagactttttccaaagtccttaacatatgcaaagagagcagctcgggtcctgggactattgcgcaaaagaacgctgaactcaaattggattctaagatattaggatggattgatcgacacgtgatggggacacagtaaagtagcagtaaccttgtctctgctctgtttatcctccgcatccatggggatcctgagagatgcttggtcctgcagggatttattgctttagcgggcataaatgagggctgtaggagtttgctggatctcctcctcatccttgaactttcttgctaattacttgagcatcatggctttgtagcacctttctctgaatggattcccaggcattctgatggaggcattcgttgagccttggagcattctttttttttttttttttttttcagacagagtttcgctctgttgcctaggctggagtggtgcaatggtgtgatctcggctcactgcaacctccacatcccaggttcaagcgattctcttgcctcagcctcccgagtagctgagattacaggcatgtgccaccacgcccagctaattttgtatttttagtggagacagggtttcaccatgttggtcaggctggtgttgaactcctgacctcagttgatccacccacctaggccccgcaaagtgctggaattataggcatgagccaccgcacctggctgagccttggcgcgttcttatttccctccctgtatggaagttctcccttattctgaagggtatttgtttattggagacttttttctttaccaggggctttttagggatacatttgagagtcccggctttgttttcttagaatgtaagttttaagtgcaggcctctggccttccaggtctgagacacagacccagtgtcttaaagccaccaggccccacggagatccccatgcacgtccgtgtgcagctgcccttaacctatgcatgcccgtcacaccgtcctctcctttacattcatttcccagctcatcgtctagaaatgagaactctataaagccactcatattctggaacagaggggctatcctactgagtccgatgtgtgtgaccagtatccactggtcagtacttagcccctttgattcgttctgttcactggaatattaaatacactgaaattattccttttggaatatttgtggtctgaaagcatgaagccatttcctaaagatatgtaaattgtaaattgggttaaactcgtatattagaataaattgaatcgtgatctacttataattcctacagagctcctcagggaagaatttttatataccttaaaagagatttgtattattgctatttattaatttcacagtaaaaagaaatgagctttacaaaggcaaactggaaaaaagaaggatggtgaaacgcttacgggactctcgggaagatctgtattatgtgagggaaagtgggctgagttcagaaaccaaagaatgagatcgatgtgagtcctggttccactcgaatcatatttatctcactgtgcctaatttctcttttataaaatgccacccatctcataggttgtggcaaggattgagtgaggtcctttttgaactgtaagattctatatggaaaacagggattacttttatcttagactggcaagcccagttacacagatgtttttaatgtacacaaaaaatggacaaatggatggtgtgcttttaatttaaaagtcaatttataactggaatccatttatttgatgaattacatttttaaaataaaatgtctgctgagaagaataatgtaaataatgaaaaaacaaaattttttaatagcatgcctggttcaagagaagttcagatacacccggactcggatcaaatctcagggcttcatgggaattcatttcactctgaaggtaatattttattctaagtagtagcactttaaaatggaaatgaatgcaaaagttttatgttagctattttttaaaagtgtgtaaacacaaaagcattttaaaatttgctaattgtcagatgatagctaaaagccagtttgtatactgtagattttatgtcaacattcaactaataaacactgaggactattttatttggtcagattattcatttaaagtcatatattaattacagccatcttattacctgacaagtggaagagataatgagttccgaagttacatagaatttggattaacttctgcttactttgctttctgactggatgactttggacaagttatgtgaccaccagaatcacaattttcttgtttataaaataggcctaacactaccttcctcacaggactgttagaaggagtaaatgaggggctggccgtggtggctcacgcctgtaatcacgccttgggaggccgaggcaggcaggtcacctgaggtcaggagttcaagaccagcctggcccaatatggagaaaccttgtctctactaaaaatacaaaaattagctgggtatggtggtgcacgcctgcaatcccagctacttgggaggctgaggcaggaggattgcttgaacccaagaggcagaggttgcagtgagctgagattgcaccactgcattccaacctgggcaacagagtgagacttcaactcaaaaaaaaaaaagaaagaaagaaaaaaaaaggaaggagtaaatggaagaatataaaatgcacaatatagtttataaaataggatagatgggccgggcacagtggctcacgcctgtaatcccaccactttgggaggctcaggtgggtggatcacgaggtcaggagatcaagaccatcctggctaacacggtgaaacccttctctactaaaaatacaaaaaattagcatgagcctgtagtcccagctactcgggaagctgaggcaggagaatccagttgcagcaggccaagatcgtgtcactgcactccagcctgggcgacagagcgagactccttctcaaaaaaaaaagggatagacaattaatattaattcctttcccactgtgacagccctacctagtgcaaaagagaagtatctaaaactcctgactaatcaatcaggaggtcatcggtcatcaaagcagttccaaagtttatctctaaccaaaacaagtctccagtgacccttcataggcagcataaacaggtcatctctaatgctgccgggaagataatgcgatagcttcatgtcttagcacctcacctaactctggcttgaataaccttcccatagagatttaataaggcaacttcttagagttttggcaaaagtgaagactggctctattttacagatgaaattgaatatgaaaaccaaaaaaggctggaagaagaggaggacttgaatgtgcttacatttgaagatcttctttgctttgcatatcaagttgccaaaggaatggaatttctggaatttaagtcggtatgctccttttaaagaaaaaacaaaccaaaaaaaagatttgaaaagatgtgcttatatatgttttcttgtttattttaacttgtatcccttaaagtctgccttttctcccctgttcactgttggagtcacctagcgtgttaccttggctcttggctaattgtagtagcataaaggcctgggatcccttgtgaggtcacggctagcacagccctcccaggctgcacaaagtcccctgaaacttccaaggctgaaggtcgagataggaagtcctcagaaatccttcctcaaaacaaagcgtagcattgtcagtccctttcagaacggctgttcaggttgtgccctgcatgtgggcattcaacccaggggatgagaggaggctgaaaccgagccagccaccctgagtgtctttgtctaattctcaccctgcgtgctgtgggctggcagcagtcctgcaggctcactgcctcctctgttgctaaccccagatccattcgttggtaaggccctggagcctgccgtgaaccatgtctctaccccaattttgcactctttttgaactgcctttccacccgctgttctctgtgatttcaaatgtctcctgcctataagcagatcatagcccactctctggctaccttccttcctcgtttgcttgcctttcattaccttctctttatttcccaaaattcttccccctcatttttcttgcagtcttctaatctcctcctcctcttctcctccacttccttccccttgcctcttctctcctgttttctctctgaatttggaaagactactttcaattgtatttttttgttttgttttgttttgtttttggagacagtctcgctctgttgcccaggctggagtgcagtggcgtgatcttggctcactacaacctctgcttcctgggttcaagcaattctcatgcctcggccttccgtgtagctgggaccacgggtgcataccagcatgcctggctaattttttgtattttaatagagatgggaattcaccatgttgcccaggctggtcttgaaatcctgagctcaagcaatccacctgcctcagcctcccaaagtgctgggattacaggcgtgagccaccacactcggccttttttctttaaaaaattactgcctcagccagatgttcatggtgtgtgtctgcagttccagctacttgggaggccaaggtgggaggattgcttgagcccaggagttggaaactgcagtgagctaggatcgcaccactgcactccatcctgggtgacagagcaagtctctttctctaaaaaataaaaaataggcagccgggcgtggtagctcacgcctgtaatcccaacactttgggaggccgaggtgggtgaatcacgaggtcaggagatcgagaccatcctggccaacacggtgaaaccccgtctctatacaaaaaaaattagccgagtgtggtggcgggcgcctgtagtcccagctacttgggaggctgaggcaggagaatggcatgaacctgggaggcggagcttgcagtgagccaagatggcgccactgcactccagcctgggcgacagagtgagactctgtctcaaaaaaaaaaaaattaattaaaaataaataaataggctgggcacagtggtgtacgtctgtaatcccagtgcttttggagggaagcccaagagttccaggctgcaatgagctatgactataccactgccctccagtctgtctattcaaaataataatgaaataagcttaaaagcaataataatacaagttttaaaaaattactgtcacagtaatatttccacacctctgaactgcgaggcacatttttctcttcattttccccacctgctgtttggattcttcttgctcacgcatcttgcccacctgagtctttctctatttcacttatacaactacaatcctgctttcacaagcattttgtttttgtttttgagacaatgtcttgctctgttgcccaggctggagtgcaggggtgtgatctcagctcactgcatcctctgcctcccaggttcaagcgatcctcctgccttggcttcccaagtagctggggttacaggtgcacaccaccacacctggctaatttttttgtatttttgtagggataaggttttgctatgttggtcagactggtctcaaactcctgactcaagtgatttgcccgcctcggcttcccaaagtgctgggattacaggcgtgagccactgtacctggcccacgaacatctttatagaggtgggagaacacctacttagattgtctggcctggtttgctgcccatagctaagtaaatactcaaactactcccaactggcagtcaaggggcactgcttccccttcaaccccaggcttgtaataatatgaatttttgaagaacatccagtttcttaggccttctatccttttatcttcacatcaggcctcccctttgaatcatgcgtgtcactgtccccttcttgtctctcaccccctccctgatattcctctgggtgcccctcagtttcctctgtaggcccttgacttcatcaaacatttgttgagccccagctacatgccaagcactgtactagatgctggagatacagagtcagttatgatatgactcctgggctcgaagatcttatgaatgataggggagacagagacaagcagacatgcaagtcgaagatgacactgaggccgggggtgggtggctcaggcctgtagtcccagcactttgggaggttgagacggtggattgcttgaggccaagagttcaagaccagcctggccaacatggcaaaaccccatctctactaagaatagaaaaacagccaggcacggtggtgtacgcctataatcccagctacttaggaggctgaggcatgagaatcgcttgaattgggaggcagaggttgcagtgagcagagattgtaccgctgcactccagcctgggtgacagagtgagactttctcaaaaaataaaaataaaaaattttaaaaagtttaaaaaagacaacactgtagcatgataagtgttgtgactgaagtaagttctgggaacccaggggagggatctgcacagcagacctggttgggggaaggggagatgcagtggaagaggctttctgagggagtgcgtgcttcatgcttggactaatggagatttttgaaggaaaaggaaaaccagcagggaatgtgggataggataggaagcatggaatcaggaggagttttttttggagaaaggtaatgagttggacatactgaatgtgaggtgccttgagcaaccaagtagagcgtggtctagcagacacttggacacttctcctgtctgaagctcaagagaaatgtttgggttggaaatagggatgtgggcaatggtggttgcatccctaggtttggatgaaatggcttgggtgagggtgtgggttgtgaggatgcagccctcaggagtgagagtaggctcgtgcacaaagcccctgagggagacaggagccggcagagcagtggggagaaagcaggagtgaaccatgcgcagggttcccagagggaggaccagaagcgggaggggctggccaacagcagcagacaccacagggaggtcccgtcagatcgagactgtgtgggtgccaagccagtcagtgcaggcctcggccagagcagcttgggcagacaggcaggaggaggaggcaggttgcagacctggggtaaagtgggcaaagtgcaggtagatggcactgaaaaaactgggtatggaggagggagctctagaggggctgtggcacagggctgccagtgttcatggtgctgctttttattttttaaagatgaaagagtgtacattggacctttgctactagtgccctgttccccttcagatcttcctttgtaaagttcattttcttgtcagacccctttgattaacatcacgacatctctcagctcagggactccttctaattccagttcagtaaacctctccaaactcatttttagctttttgtttttccgattatttccctcgatattactccatttattcctaaagctattttccagtcagaaaagagatgctggccaggcgcggtggctcacgcctgcaatcccagcattttgggaggccgaggtgggtggatcacctgaggtcaggagttcgagaccagcctgaccaacatggcgaaaccccgtctctactaaaaacacaaaattagctgggcctggtggcgcgtgcctgtaatcccagcaactcgggaggctgaggcaggagaatcgcttgaacctgggacgcagaggttgcagtgagccgagatcacgccattgcactccagcctggggaacaagagtgaaactccgtctcaaaaaaaaaaaaaaaaagaaaagagatgctatttctcacacccacaataagagtactggaggacagctctgagattccctctgaaggctcaggggagggcccctgttggggagcctctcacttttgctcggaatctgcaaaagatctgctcctctttggcctctggggatgcttcagaagccgcacaaagaactgcagccaccatagctgcagaattaggtctcctatattcactttgtttgttgcacatcatcatggccgctcacggcacagcccagtaaagataagaggccttccatcaccggtacctcctactgaagttgagtctagaagaaagattgcactccaggataatacacatcacagtaaataacactctggtgtcattcttgacagtgtgttcacagagacctggccgccaggaacgtgcttgtcacccacgggaaagtggtgaagatatgtgactttggattggctcgagatatcatgagtgattccaactatgttgtcaggggcaatgtgaggctgctatttcctacttatttttatacggctattttgtgttgtgtcgttatcatggtaaacaactgcactcactgtggtgcatttttgatttatggtaacatcaaaaaaccctcacagcagtctgcttacttatgcttaaaaggtttttctgcagcttcagggaatcttccatctataataaaagctgagcaaaatagcatcacatctgtccttgggctagctagtcagagtagatcagttaggggcctttgagtgcaatcctcactttaaaaaacccaaaatctcaatacttgcacttagttcagttatcctagctataaagtgatgattgagttatgttttcaattatgtgaaaagctaatagtcacaataaagcactttaaaacatatatagcacatacctataaaatgttaaagctaaatacttaaatatgaattaatgaatatttatcatccttttactgttaacacaggaagatctaaaacatgagtgaattggctgggtgcagtggctcatgcctgtaatcccagcactttgggaggccgaggagggcagatcatgaggtcaggagttcgataccagcctgactaatatggtgaaactctgtctctactgaaaatacaaaaaattagctgggcgtggtggcgtgtgcctgtaatcccaactattcgggaggctgaggcaggagaattgcttgaacccaggaggtggaggttgcagtgagctgagatcgcgccactgcactccagcctgggcaacaagagcaaagctctgtctcaaaaaaaaaaaaaaaacaacaacaaaaaaaacagtgtgaattgacttggtaatgaaaaactaaggacagatgtgtttacaaaaagaactattagaagtaatagatgacaaaattgtgtagttgaaaatgtgtgtttttaaagaattacaatacctggctgggtgctggtggctcacgcctttaatccaaggcactttgagaggccaaggtgggagaattgcttgagcccgggttcaagaccagcctatggaacatggtgagacactcaactgtctctataaaaaataaaaaactagctgagtgtggtggcacacgcctgtggtctcagctacttgggaggctgaagtgggaggatcacttgagcccaggaggtcgaggctgcagtgagctgtgatcacgccactgcactccagcctgggcaacagaatgagacccttttttttgagaccctgtctcaaaaaagaattccctacttgtgaaataataataatattaaatgctgacttagtgcttactatgtgctaaacatctaagtgctttatgcatattaattcatttattcctcagagtacccacttggaaactgaggcacagaaaagtaactcgcccatggttacacagcatgtggacttgaacaggaatagtctgagccccgagtctgtgctaaccactatgttgtagtgtttcccatgagggttatgcacttacctcatagcgttgatgtgggaaaaagccaataaaaccaacgtgaaagcaccttgtccagggtgaacatccagtaaatgtgaaaagtcaaattaaactgtattcccactagaaacaaataatcatcttagctgatttacgatctactcctactcatcatagactgctcatatgtagtcattcagtttctaccccaccagctggttgtctcttatgtgggaaagtgaattccatttggaaccacaattaatttctttaattaatcaaattaaccagacttgcctgcatgaatcaatagctcatcagtttgcatacatttaaaagagggtttacttggctgattaagcatgtgctgattaaacatgtgctgtgaaggactcgtcaacccatgtaaaagaaaatcagtacagccaggtgtggtggctcacagctgtaatcccagcactttgggaggctgaggcgggtggatcacgaggtcaggagttcaagaccagcctggccaacatggtgaaatcccgtctctacgaaaaatacaaaaattagctgggcatggtggtgcgtacctgtaatcccagctactcgggaggctgaggcaggagaaccacttaaaccagggagtctgaggttgcagtaagctgagatagcgccattgcactccagcctgggcaacaagagcaaaactccgtctcaaaaaaaaaagagaaagaaaatcagtacaaagctctgccccagtaacctacccatcttgtgtcttgattctagtctgagactatactaagtcaaaactccctttcatgctagtggaaattattaaagccacagaagccagactggtatcatttctggaagtgatggcgtgggctcccctcccgacattattgtggatgacatttccactaaaggtcttcccagaaatgctgtaacagaagatctcactaattcactagtacccacttacccctaggcaactgactggctattccttaatggaaagtacctctttccagtggaaagatggcaagttaaacttacccattccaagcacaagcctttgttcgagaggagttgtaaagaaatatgccttatgttttaggctagtattattagaatgttaatttgaaagtgaaaacctttcacgtgaggaatgtgattttctcaataaggcattaagagtggtcttaggaagatgatgcatttcatcttaatacaaaagaaaagaagtcatgtctgtatgtggaaaattcaccatcttatctcctctgggttttccacaggcccgtctgcctgtaaaatggatggcccccgaaagcctgtttgaaggcatctacaccattaagagtgatgtctggtcatatggaatattactgtgggaaatcttctcacttggtaagttgggcagctgctggcctcccttggctcctggctttgcatcctctgctctctcggtgcccccccacccctccccccaacactgatgggtcttacttgtattgcagcccatgactttatgtttatttgctggtgtcctttagcctgtcttcctcactggtctataacctgcttgagagcgtgaaccgtgacttctttttcccagccgcagcccgtgtgcctgcaacagtgtctggcacatggcagatctcaatacgtgtttaattgaatgaatcaataaacaaatgaagaaatggatgaatggctgcaattgtctaatgttttcctcaggtgtgaatccttaccctggcattccggttgatgctaacttctacaaactgattcaaaatggatttaaaatggatcagccattttatgctacagaagaaatgtaagttcaagtcagactgtaatttggttgaaatcagaaaggtacagtctgtctacttccaaatgcatgaccaaaaaaagtcaaactccttagtgcaaagcgtataggattctttttttaaaaaatagaagtgaggtcttgctgtgttggccaggctggtctcaaactcctggcttcaagcaatcttcctggctcagcctctcaaagtgctgggattacaggtgtgagccaccacacctggctgtctgattccattttaaaaagaaaagaaaactctttgttttgggagtttctgaacaaagctgaacctttcctgtcctcagaggcacctgcttcccggttttaattcctttgcttgagggctccatgaaggtcattcgattctatccactacgtcatgtttctttaaatgcatttctgcccatctgatttctcctttcggatatgaattcaaaatctggtagaggacttgccacaaaacaaacatgctgtaaataagcagctccagaggaataaatggtgcttcattatatggaaaatgatccattttgcttcattcagacttcttcatcttgttccttgttctattgcttttacagatacattataatgcaatcctgctgggcttttgactcaaggaaacggccatccttccctaatttgacttcgtttttaggatgtcagctggcagatgcagaagaagcggtatgtagcagccaggactttataaagctttacaaaggaaattggtaaattaaaacacttgttgctgtcttcctgtgaaccaaaggtaccaagttgtcattctcattgcagtttttctgggttgccctttcaaagttgtgtggggtaagactttatttatttgtttatttatttatttattgagacagggtctcgctctgtggcccaggctggagtgtgtggcgtgatcatggctcactgcagcctcgacctcccaagctcaagcaatcctccagccacggccttccaagtagctaggaccatgggagggcagcaccacgccaggctaagttttttattttttgtagaaatagggtatcactgtattgcccaggctggtcttgaactcctgggctcaagcgattcccccacctcagcctcccaaagtgctgggatcacagggcatgagctcctctgcctgccctaagacatattgataaaaatgtttttagggaaaaaaaacacctttcctgatttcagccaaatgattaataaattaaaagctcttaagagttcagtgcagtgaagtagacaactaaataaaactaaataaaaataatccctggcctccagaagccactagccctttcttatgaagcatgagtgtggaaaaatcacatgactcaatcatgctatatggtagcctggaaagagcattgacctggagttctgagggttgaataccagctgtaccactctgtctcccaattgtgtccattatagcaaatcactttacttctctaagcatcagttttctcacctgtaaaatgggttgttaagttagattatcttttgagctttgaggacttggaatttctttgctaacgcttcccccatcaacaccaccacctggtatagtgaaaagaaccatctccagatgaaataaataaaggagagaaccttgggctcctaatactgaggttcagatcttggctccatcgtttacttgataagtcacttaatcttttggggagtctccttctcagtttctttacctgaaatatgtgattaacaaatctcacctcatggagttgtaagaaggagtaaatcaggtgatgtatgtgagaagagttagcacgtactgggcacttggtatttactccataaaatgttagttaaatataaatctgatttttaagtggattgtctgtcctcctttctaaattgttatgagtcagttttcagttctgtattctctatatagacctgggtagatagtgtgtactttcctactgctgtgatttttttgaaaatgacatggaaactaggttattgtcagagaattaggtcaaaaggccagaggaaatggaaagcccccagcagacttatagcctattgcacagatacctataaactgttcatgacaccataaggtaaactgaaagaagagtttagaatgaaacaggaagtgatctggtaaagaaagaatgtatatgtgcatgtatagctgtctagctatacactttttttttttttgagacagggtcttgctctgtcatccaggctggagtgcagtggaatgatctcagctcactgcagcctccacactgtgagctcaagcaatcctcccacctcagcctcccaagtagctgggaccacaggcacacaccaccggacccagctattttttttgtatttttggtagacacgggctctcactatgttgcccaggctgttctcaaacttctgagctcaagtggtccacctgcctcagcctcccaaagtgctaggattacaggcatgagccaccacgcctggctaagagaggactgattgatgttactcattgcatagttgggtgtggatttgtggggaacttgtgagctggatgtgaggactgagtagcatcttgtctgctggagagtagagggtgagtaggatattccaggatgaatgaatcatataaataaaagtccaaagttgaaaaagtagagtggcaagtagatggctgtgcctaatatacagggagaatgggggagtagagagggaaaaaaaagtgcaaagctcgtgtcgccaggatggaggcttcaggaccacttgggtcttggtttgagcttctcctttcctgtccccatactcacaggatgtccagatcccctttcctgtgttcagggggcctgtcaggtatcaggaaccgttgaatggcaacatatccatgcatgattaatcagctgagagaatccatgcttagggacagacggttcacaaactttttctcccagttccttccactctgttccctgaccctctgtgaccagtgtcagaagcacccagagaaaatggtagctcctttaagcaggttagaaaacaggcccccatggcccattgcagtgggtcacacatgtaatcccagcactttgggaggctgaggtgggcggatcacttgaggtcatgagttccagaccagccaggccaacatggcaaaatcccatctctactaaaaaaaaattagccaggcgtggtggcgcatgcctgtaatcccagctactcgggaggctgaggcagaagaatcgcttgaacctgggaggtggatgttgcagtgagccgagatggcaccactgcactccagcctgggtgacacagtgagactctatctcaaaaaagaaaaagaaagaaaaagagaaagaaagagagaaagaaggaaggaaagaaagagaaagagagaaaaaaaagaaagaagaaagagagaaagaaagaaagagaaaaagagaaagaaaggaaggaaggaggagggaaggaaggaaggaaggaaggaaatgcccccctccccgggtgggaggagtccagaggaaccccttacttagggctcatgcagcctgcctcagtctaagccagtctgaaggaggagagcttggcgtgggtctcagccatcttgcccgctctgctgggcacttttgtttggtgcaaggcacaacccacacagccacgcaggcagccctgcccactctgcagaatcctatctagtcccttggttggaaaactggccttgtcaccttccccagggtgatcttccctgttatatctgtgaaaggttttgtagaatcttctctcctcccctcccctcccctcccctcccctctcctctcctcttttctttttttttgagacagagtctcactctgtcacccaggctggagtgcagtggcatgatctcagctcactgcaacctctgcctcctgggttcaagcaattcttatgcctcagcctcctgagtagctgggactacaggcacgcgccaccacgcccagctaatttttgtgtttttagcagagacggagtttcaccatattgtccgggctggtctcaaactcctgacctcatgatccgcccacctcagccttccaaagtgctgagattacaggcgtgagccaccccacctggccctatttttctttttaatttattttttttagacagagtctcactccgtcacccaggctggagtgcagtggcgtgatctccgctcactgcaaccttcacctcctgggttcaagcaattatcgtgcctcagcctcttgagtagctgggattacaggcatctgccaccacgcctggctaatgcatctttagtagagacggggttttaccatgttggccaggctagtctcaaactcctgaggtcaagcgattcgcctgcctcggcctcccaaggtggggggattacaggcatgagccaccatgcccggccagaatctttgtttctgcatcaaggactagggaaggaaaagggccctcagagaaccagagagaaagagtgggaaatgcatggagaaaacataggttaaggcttttatgtctaacctcaacaccaatgggattagatcagggagatcactgattacatgattacctgtctaggcatttagacagtggtgaaccgatgaagatttttaggatggacaaacatgcttcaatctttaagaaccagatcaaatattctgtgctctgcaaagcctcccccaatttccctagtcagatttcaggctgctgcttctgaattctcattaacactttcagctgtaactccatgtgagactcaaatcctagtgtaggatgactttatattatgggtctctctctgtcgtcactagacttcattagcaagggtaaatactgtttcctgttcatctttacaccccatggggtagtgcttgccatgtgatattaagtaaatgaatgaagtcagcatgaaagcaagttggagaccacatctgtttggttcatcattatagaccccgctgctagcatgatgcttagcacgtggaaggcgctcagcaaacatttctggaatgagaaagaaaaagagagcataaaaggaagtttggaaaagcgaggcagaagatgagatgtcaggacatcagttgagaggggcggcagcagcaaggatgggcacgctgagggagcacactaggcaggggctgtgggctgataaaagggggcacatacttgtcccctgtttcagaaaaggggtctgaactaacatcacctcccctctcctactcagccccataaattataggaaataagtttgttttgttttaagagaagggaggccaagcgtggtggctgacactgataatcccagcactctgggaggctgaggcacaaacatagattgagctcaggagttcaaggccagtctgggcaacatggtaaaaccctatctctacaaaaaaatttgaaaattagccaggcgtggtggtgcattcctgtggtcccagctgctagggaggctgaggtgggaggatcgcttgagtctggggagcggtcatggctgcagtaagccacgatcatgccactgtactctaacctgggtgacagagcaagactctgtctcaacagaacagaactaaactaaactaaaataaaagtgaggccataattggctttgacagtaagaaagagatctttttgtggaccagaaactgtggaaaatccctgagacaatgaaagcagttaaaattgcaccgcagagggaaaacccaccacagaggatgcctgggaaaaacaaggacaagggtaacacaaaggcagcaagaagtcctgggacactgcagaagttctgaagcaggagcagccacatggtgaaatcaacataagattaaatgtgggtgttaaaaatgtaagaacgatatgggtgagatagaaacgtaacacataacttctgtttcagtacaggggaagaaaatgaccatagaaaacataatcagtccaacaaaatgggggaagagaaaaataaagagagttcatggaaatagaaaacacaaaattagctgggtgtggtggtgcaagcttgtagttctagctactcaggaggctgagctgggaggattccctgagcccaggaagtcgaggctgcagtgagctataactgggctgctgcactccaatatgggcaaaggagagagatcccatctctaaagaataaaataaataaataaaaattgaaaatacaaaaataaaacacaaaatggcaacaatcagtaagcctacttaggaaagagaatctcagaataaataaagttgttaacatgcattgttagtgaatgccacattcactaatctcaatacaatgtaataaaaaaatcacccaaccaaaaaagcccccaaatttatataccaaaattaaaaatcagccaggcgtggtagctcacgcctgtaatcctagcactttgggagtctgaggcgagtggatcacctgaggtcaggagttcgagaccagcctggccaacctggtgaaaccccgtctctactaaaaagacaaaattagctgggtgtggtggcaggtagctaaaatcccagctacttgggaggctgaggcacgagaagtgcttgaaaccgggaggcggaggttgcagtgagcctagactgcaccattgcactccagcctgggagtgcaaacagaacgaaactctgtctcaaaaaataaataaataaaataaaaatcatgcctcttaagcaagtctttgcttaagaagaagaaggggaaagagggagaaggagcaaaaatggatattgcctattaaaacctgtgagagttacccaaattcataattctaaattcatttattagaaaacaaagaaaaatgaaaatcaatagctaacctttttttccttttttttttttttttttttttttgagacaggttcttgctcattgcagcctcaaattcctggaatcaagcgatcctcccacctcagcttcctgagtactttttaaaaattctcttttgcagagatggggatcttgctatgttgtgcaggctagtctcaaactgctggcctcaagcaatcctcctgcctcagcctcccaaagtgctgggattactggtgtgagccaccgcacctagcctgattaacctttcaatttaagaagctagggaaaaaacaaacaacaataaagaagaaggtggagagagagaggaggaggaaaatgaacaaagcagaaagaaggaattaatagagatatagccagatttaatgacacagaggaagtagcaacagcaaaataatagcgatgatcaggaaaaccaaaagttgttttttgaactaataatgtaattgctaacattttttgagtatttaatcatagagtttactaatgtattagccacaaaattaataactcttaatcctcacctcaatctcctgaagtaggttctattattatccctttagcagactagtaaattgaggcacagagaggttaagtaatttgcctaaggtaacatggtaaatgtcagacttaggatttgaatacagcagtctgagtgtagtctatactgtatattaatattgtatatcaacaaagtatacaaatatactactaaagctactatctttgaagtgaacaattaagaaaaaaagaagtcgggtgtggtggctcacgcctgtaatcccagcacattgagaggccaaggtgagaggatcacttgggctcagaggtttgagaccagactgggcaacataatgggaccccatctctaccaaaaattaaaaaattaaccaggtgtagtggcgcacaccagtagtcccagttactcaggaggctgagacaagagaatcacttctgcctaggaggttgaggctgcagtgagctgtgattgcaccactgtactccagcctgagtgacagagcgagaccctgtcttgaaaaagaaaaaagcacaaataaataacattcagatgaaaaggaaacgataactaaggaaaaaagaaccattttttaaagtataagaaaatttatgtacttctttataatgatacatttgaaaacctagggtttgtttcacaatttcataaggagaatgtatttaaaaagtcatttaaaggtcacttttatgatgttatctgtgagcctgttaaaaacaacagtggctgagggtggtggctcacgcctgtaatcgcagcactttgggaggcctaggtgggtggatcacttgaggccaggagtgcaagaccagcctggtcaacatggtgaaaccctgtctctactaaaaaaatataaaaattagccaggtgtggtggtacacacctgtagtcccagctacttgaggcacaagaattgcttgaacctgagaggcagaggttgctgtgagctgagatcatgccacaacactccagcctgggcaacagagtgagactctgtcacaacagcaacagcaacaacaaaaaaaaaaaaaaaaaaggaaagaaaggtcacttaaagaaatggaaaagagtgatgtattacaactatacccagtaactagctatgggagtggagagagattgtcagagatggttctagaaacttctagacagtgagactggatgaagagcacatgttagttaattcaggtggaagattggaagtgttattggtatttgtgctacacaaacttcatgaggtggttagaaattcagtggtagagatgtacatttggattcaacaggttcaacaaatgctaactaactgctatgtctacttcacaaaaggcacgcatgagtagttactgttcatccttcagggtacaagcaaagctgtcattgtgcaacacctggttcacaatggatatattttgggtcaaaggatacacacacacacacacacacacacacacacacacaattttctagaaagaaaagtgaagtgtaggaggcagtctggacagttcacattaaaactgtcaaaaacaaagaaaaagaagtagacagtaacaagggctgtgggaacggaacaaatctataaaatttaaatagaatgcatgattcctaaatcataaagttcttataaacaaataataataaaaatgtatcaccttttaaaaacttatttcttttagagacaggatcttgctatgttggttagtttggtcttgaactcttggcctcaagcaatcctcccgccccggcctcccaaagtgctaggattacagagttgagccagtacacccagcctgtatagccttttatatacataaaaggcaaaggaaataggcaggctattcaaaatgaaaacaaatggacataaagtataggaaaaaggcccaactttgcagatagtgaaacatatatagttaaggagatagaacttcttgctcagcaaaagagaagagatgtgggaggctgacatacccattgttcagaaggctctggaaaatatagtttccaggcaccgttgataggagtagaaataaatacaacctttctgcagggcagcctggccttgtgtatcacagttcaagtgtgcatcctttttgatccagcaattccacttctgcttatcccaacgtcagactagattgagtgtgcacttttcagtttgtttcgtataaccagttggtcaaaaggttaattatgatgcatcagtactatggaactctaggctgccgtgaaaaaaaaatatgtggccatccttagtgaataatgtaaatatgtgacacaggcaacatatgagcagtataataacaatatattgataattcaaaataaggttccaaaatagaatatatagcctgagcccacagacacaaaattgtgtgtgcatagcaagctgtctataatggcgggtacttgtcatgacttgtagccttttttcttttttttgagatggagtcttgctctgtcacccaggctggagtgcagtggcacaatctaggctcactgcagcctccacctcccaggttcaagcaattctcctgccttagcctcccaagtagctgggactgcaggcgcgcgccgccatgcccggctagttttgtatttttagtagagacagggtttctccacgttggctaggctggtcctgaactcccaaccccaggtgatccgcccgcctcggcatcccaaagtgctgggattacaggcatgagccactgcgcccggccttctacgtctctttctgtatttctcaaattatctatatgaatgcatgttaacttcatatttgggaaaggaaagtaaatctcttcatttcagaaaaaaatatttaaaagtcgtgaaactccaagggaaaactcaagaatcagtcccttgtattaactccataatgaacagatttccttttgtggcctttctcttttatgatttttctgcatggttttaggatttctagagtgacattttatatctgagagtagactcaataatgaaataaaatatttgactatgatttgatttctccattaataaaaggaccaaaattgcttttttagttatatagaatatcctctgagacctatgcataataaaagtacttgtctacacgtttcctgaaaatatgtacatctattatatatcagtttaaacattttaaaagtgatgtctaggccgggcgtagtggctcacacctgtaatcgcagcactttgggaggccggggtggtgtgggatcacttgagcccaggagtttgagaccaccctggacaacatagtgagactttgtctttacaaaaaataaaaaaattagcagggtgtggtggagcctgcttgtggtcccagctactcaggaggttaaggtgggaggattgctcaaacccagaacatcaaggccacggtgaactatggttgtaccactgcactccagtctgggcaacagagcgagactctgtctcaaaaaataaacaaacaaacaacaaacaaacaaaaaagtaattgtctatatagaacaactgtttttatttaaataatttgtaatatgggcgcataacatgtgcatctacatcagatggtaatcagtgttctgtctctttcccacattcagatgtatcagaatgtggatggccgtgtttcggaatgtcctcacacctaccaaaacaggcgacctttcagcagagagatggatttggggctactctctccgcaggctcaggtcgaagattcgtagaggaacaatttagttttaaggacttcatccctccacctatccctaacaggctgtagattaccaaaacaagattaatttcatcactaaaagaaaatctattatcaactgctgcttcaccagacttttctctagaagctgtctgcgtttactcttgttttcaaagggacttttgtaaaatcaaatcatcctgtcacaaggcaggaggagctgataatgaactttattggagcattgatctgcatccaaggccttctcaggctggcttgagtgaattgtgtacctgaagtacagtatattcttgtaaatacataaaacaaaagcattttgctaaggagaagctaatatgattttttaagtctatgttttaaaataatatgtaaatttttcagctatttagtgatatattttatgggtgggaataaaatttctactacagaattgcccattattgaattatttacatggtataattagggcaagtcttaactggagttcacgaaacccctgaaattgtgcacccatagccacctacacattccttccagagcacgtgtgcttttaccccaagatacaaggaatgtgtaggcagctatggttgtcacagcctaagatttctgcaacaacaggggttgtattgggggaagtttataatgaataggtgttctaccataaagagtaatacatcacctagacactttggcggccttcccagactcagggccagtcagaagtaacatggaggattagtattttcaataaagttactcttgtccccacagtccccttcattttatttttatttatttgtttgtttatttaatgttttagtgacagggtctcaccctgtctcccaggctggagtggagtggtgagatcacagctcactgcagcctgaaactcctggcctcaagcgatcctcccacctcagcctcctgagtggctgggactacaagcacaggccaccacgcccagctaatttttaaaattttttgtagagatagtgtcttgctatgctgtgcaggctggtcacaaattcttggcctcaaacagtcctcttgcctcagcctcctaaagtgctgggattacaggtgtgagccatggcgaccagccctctttgtcctttgaagcttagcaccctccatcctgtaggcttgtgaacttggtttgtgcccccgccccgcccacctccgcttacacgacaggtgccaccaaattctgcctcttctttctcctccacctcctgttgcatgtagtggtgagggacaagggatctggaaccggtcagcccaggttggaattctcttttcacctggccttagctgtgtcattggggcaagtaactcaacttctctagcctcagtttccttttctgaaaaatgggacactaatggcatctcttttatagagttgctggaataattagatgaattaaatatatacgtagcttagaaatatagaaatatagaacataaacatatacatcatgtagatcaatgcctggcacctcagtgtgacctaatagcatcatttgtgccttcctttatagttttaatcctttgcctagtaccaggtcaccataaactcccttagattaccagtccttttaatggcagcagcggcccatctggagtggccactgcaaagatgccagctgcagtgtgggagccacaggggctgtgcgctccgtggagctagtgggagccccgcccccttttgagatggcagggcgggagccccaccctcctgggagcagctgccaccagactagcggtggctgcagacttagacgtccctgcgctcccggccggggaagcccttcctgcccccactgctcacaagtgtctgctcttgctgcctggcctcttcccactcctggtggcactcagatttttgagcaaagttgaggctgagctcccccactgtcgccgccctgccaggtgtgtgcgcacttagggtggcgctgacatgccagccccctgctgccttggccccctctggactttggacaccgaccagcacaggagggaggccaagccggggctgagggtggctaggcatgggtctgcaggtgcccctcagcaggaacagtctaggcaccgtggatgacataatcgatggtagcgggaggcagataggctcctgggcagaaggagtcaggtccccagtgaagccccaccttcaagccagggactgcccgaagcatgggggccaagctgtcagttccgggtggggtccccagcagggagtgagaaattctggtgctttttcgctggcccatgcaccaacaatcggcatgcactttctcctttctgaagcccattaacctccccactccccgcacccacctccctgacccccacaactcagccagatttgcagagacctcaggacaacttgcctgtggaagggagctacccacttcaggtctcctgagagctgttctgttgctcagtgaagctcctccctgccttgttcaccctccacatgtgcgagtacctcattcttcctggacactggacaagaacttcggacccactgaatgatgggactgaaagaactgtaacaacctggtgacaagggaagaagacgtggcccttcagggggcccagacctcgagctccccaagccagggctctgacagcctctttggggctctgtggttcctggcgtctccaagctgccaggccaccgtgttccccttgtccagacatggatgcctgcagcagaagcggcatgtgttatatctaacccagctgtagcctcaccctgagctggcacctgtgccagtgcctggagctgcccaccccgctgcagcagccagcgtgcctggctgcacacagtggtcggacccttggtcactaacccacgcacccctcctggctctgcgcctggctcgcccttggcaggtgtgggatctgggcccatattgcaagctgagccagactgctgggctgagtgggtggaataagcccagaggctgcgagcaatactcaggcagaaggcatcgcgagccacaaaggtttccagctggcaaagcaacaccccaaggatcctgtgactccttcctcacctaactcttcctccaatctctccaccattcagtgttttctctaagccactgccaggttcatcttcctaaagtactgatttgcatatgtcgctgcctgcagggcttcctgggatctagcagctagttcccagggtctagcagcaaaagccacactctcttcctagcactccatgcacccacagcctggcctcagcattgctcagcactggctgcttagcctgtccctctagcgagtgtgtcttgaacattcccacctctggttttcctctccttggaatgtcaacttctgctcttcctagttacatccttgcttcctgaccagacttcagctctttcttctccttcaggtcttcgccagtttccgagcccatgagtgacggcttcctgcactgaaatgtaagggcttctggtctgtatctcaatgtagagcctgcctaccttatgctgttatttatcttcttaagtaaatgtcctgtcttcttaacaggattttaagaagtttgaaagcagatatgatttatgccaagttgtatgcttaactctgatttgggtatacagtcaagatacaataagtatacatagtcaatcacttttttacctactcaagtaaaaacataaaatacgcttgatgttaaaaatcaaatcattttgacccggcgcagtggcgcagtggctcacgcctgtaatcccagcactttgggaggctgaggcaggtggatcaccaggtcaggagttcaagaccagcctggccaagacagtgaaaccccctctctactaaaaaatacaaaaattagccaggcgtggtggcgggtgcctgtaatcccagctacttgggagcctgaggcagagaattgtttgaacccaggagacggaggttgcagtgagccgagatcatgccactgctctccagcctgagcgacagagcgagactctgtctcaaaaaaaaaaaaaataataaactattttttatttttacctataataataagtgggaccttttatttgtacaacccaaatcccaaaatactacttcgggaaaactactgataaagtttgaggtattggctggatgcagtggttcatgcctgtaatctcagcactttaggaggcggagatgggaggatcacttgaggccaagagttcaagaccagcctgggcaatgtggtgagagacccccatctctacagaaattaaaaaaaaaacgtaaaaactagctgggagtggtggtgtgtatccatagtcccagctacttgggaggctatggtgggaggattgctcaaaggagttcaaggctgtggtgagccatgatcacaccattgcactccagcctgggctacagagtgagaccctgtctctgaaaaaataaaaaagtttgaggtatatttcccccatcttcttgttaaatatatttacatggcagggcacagtagctcacacctgtaatcccagcactttgggaagccgaggcgggtggatcacctgaggttgggagtttgagaccagcctgaccaacatggagaaaccccgtctccactaaaaatacaaaattagcggggcatggtggcgcatccctgtaaatcccagctacttgggaggctgaggcaggagaatcacttgaatccaggaggtggaggttgtggtgagccgagatggagccattacactccagcctgggcaacaagagcaaaactccatctcaaaaaaatatatatatatgtatgtatattatataaatataaatatatatatttatataaatatatatatttatatacatataaatataaatatatatatttatatacatatatatatttatatttatatacatatgtatataaatatatatatttatgtatataaatatatatatttatatgtatataaatatatatatttatgtatataaatatatatatttatatgtatataaatatatatatctatatgtatataaatatatatttttatatgtatataaatatatatttttatatgtatataaatatagatttttatatgtatataaatatatatttatatgtatataaatatatatttatatgtatataaatatatatttatatgtatataaatatatataacatatatttatatataaatatatatatatttttatatatgtatataaatatatatatttatatgtatataaatatatataaatatatataacatatatttatgtatatataacatatatttatatataaatatatatatttatatatatataactgcacacacatagttacatatacacacacacacacatcttttttatgtaaatgaaatcatactggctatattgtcagacatgccttttattctttacaatgtgtcaatatttgcccaatatgtgtatctgtgaagggcttgttatgtgcagggaactagatgtgtgttatctcatttaatcttcctaactaccttatgaattaggttctaaacttataccaattttttctgaggaaattgaaacttgagctaataacttgctgtctccagtcccctgttaacacttaccttgagatgactgttgggttctactattatgtgattttctgtatttccttacttttctttcttagctttttgtaattctcattttgtctctttttatcatatctgtctattttttattgtggtaaaaaaacccacataaaatgtacaacctcttaaggagaaatgaaaatcaactcttattaaaccaaattcttaccacagattctatttcagtttgggtcaagttttgtacctgacataactacctatttttaacaccgaggaggaatgcaacttgctgttcctacataggctgttgctgcacaagggcagccctttccactaggcctttgtagtaatcttgccagcagctggcgccctagcacttctttaaaaaattgatctcaggccctaggcctgacttcgcgactacgccctgcctgcccctggaaaggcagattttaagtagcagaatgaaagaaaaagccaatccgctgattcgaaggaaaacaaccctctatgcagatagcttcaattcatttcttcagtattcagttgggttttaaaagttttattttaaactgacaaataataattgtatctacttatggggtacaatgtgatgtttcaatacatgtaaacattgtgggatgatgaagtcagggtaattagtatatccatcgcctcaaatatttatttatttatgattattatcattttttgagatggagtcttgctctttcgcccaggctggagtgcagtggtgtgatctctgttcactgcaacctccgcctcctggattcaagtgattctcatggcctcagtctcccgagtagctgggattacaggtgtgtgccaccacgcccagctaatttttgtatttttagtagagacgaggtttcaccatgctggccaggctgctctcgaactcctgacctcaggtgatctaattgcctcagccttccaaagggctaggattacaggtgtgagccaccacgcccggcctcaaatatttattatttatttgtggtgagaacatttaaaaccctgtgttttcgccattttggagtatacaatacattcctattaactacagtcattgtgttgtacaatagaacaccagagcttatgcctgctgtctaacggaaactttggaccctttgacaaacttctcccctcacctctcccccacatcttgcccgccccagcctctggtaaccaacatttgactctacttacatgcttcaacttttttagattccacacctaagtgagatcatacaatatttgcctgtctctgtctgccttattccaattaacacaatgtcctctagattcatccatgttatcataaaggacagaatttcctgttttttaaaggctgagtagaccgaggctggtggctcatgcctgtaatcccagcactttgggaggccaaggtgggtggatcacctaaggtcaggagtttgagactagccaggccaacatggcgaaatcccatctctactaaaaatacaagaattagctgggtacagtggtgggtgccagtaatctcagctactctggaggctgaggcaggaggattacttgaacctgggaggtggaggttgcaatgagaggagatcgtgccattgcactctagcctgggcaacaagagcgagactctgtctcagaaaaaaaataaataaataaggctaagtagtttctattgtgtatacatactatattttaaaaatccattcatctgttgctggacactgagattgtttttatatcttggctattgtgaatagtgctgcaatgagcatggttgtgcagacatctctttcacatactgattccaattcttttggacatatacccagtggattactggatcatatggtgagtctattcttagttttttgaggatcctccatactgtcttccaaaatggctgtattaatttacattctcatcaacagtgcataacggtttctgtcatctttttataatagctgatctaacaggtgtaaggtggtatttcattatggttttaatttgcatctctctctttctctctctcttctttctttttttttttttaagtgaaattttgttcttgttgcccaagctggagtgcaatggtgcgatcttggctcactgcaacctctgcctcccgggttcaaccgattctcctgcctcagcgccccaagtagctgggattacaggcgagcaccaccagcctggctaattttttgtgtttttagtagaaacagggtttcaccatgttagccaggctggtctcaaactcctgacctcagggatccacctacctcggcctcccaaagtgctgggattacaggcatgagccaccacacccggtcatcatctctcttttttttaatttttattttttgagacagggtctcactctgttgcccaggctggagcacagtggtgagatctcagcttactgcagcctcaacctcctgggctcaggtaattctcccacctcagcctcccaagtacctggaactacaggcatgtgtcaccatgcctggctaattttttgtgtgtgtatttttattagagatggggtttcacatgttccccaggctggtcttgaactcctgaactcaagcaatttgcctgccttggcctcccaaagtgctgggattacaggtgtgagccaccatgcccagcctgcatttatccctctctctctctctcttttttttttaatacattgttgctggcttgaactgcatttctcttataattagtgatgttgaacattttttcatatatctgttggtcatctgtatgttttcttttgagagatgtctattcaagcccttagcaccctcccccttttttttgagacagtcttgctctgtctcccaggctgaagtgtagtggcaccatctcagctcaccacaacctctgcctcctaggttcaagcgattctcctgcctcagcctcctgagtagctgggattacaggcacgtgccaccatgcacagctaatttttgtatttttagtaaaggcggggttttgccatgttggccaggctggtcttgaactcccgacctcaaatgatccacccacctcggcttcccaaggtgctaggattacaggcatgagccacttgtgcctggcccttcattttctcttctttcattctcttcagcttctcatgaaagacttccacagtaacagacttagctgaactcctctgccactccctttatatttttttgtcaaaaagaaatgatcaactgggtgcggtggctcactcctgtaatcccagcacattgggaagtggaggcaggcggatcacttgaggtcagaagtttggtctggtcaacatggcgaaaccctgtctctattaaaaatacacaatttagccaggtgtggtggtgcatgcctgtaatcctagctacttgggaggctaaggcacaagaatcgcttgaacctgggaggtggaggttgcagtgagccaagatcacaccattgcactccagcctgggtgacaagagcaagactccgtctccaaaaaaaaaaaaaaaaaaaaatctatcattgtttacatttgattctgtcgatgctgcggtcaccatcagcaacagaaataaaaagtgggaggagttaccacctaaaaaatacacatctgttttttagctcctagggggtccaacatgtattaaattccaaattatcttaatgagagacaaaaaggctttggtgaattttttgtggcaaaataaacataacataaaattcaccatcttaaccacttttcagtgcacagtttggtggtattaaggacattcatgttgttgtgcaaccatcattgctatcccgctccagaactttttcatcttggaaaactaaaaccatgtgcccattaaaccccttcccacttctcccttcctccagcccctcaccaccgccacccactgtctctctgaatctgactactctaggcacctcttgtaagtggaatcatgcagtgtttgtctttttgtgactggcttatttcacctggcataatgtcctccaggtttgctttgatgaactcttttattggtaacatactctgtgctaaaggcctcatacagattgtcccatttaacaaatcatgaggtaggaacttgctctgtagcagtttaacagatggtgaaaccaaggcttaaggcggttaaatcacttgtacatggagccagtacctgccgggcatgacctggaacccatgcctgcccagctcctggtggtcacacgatgtggcatcccttcggggcccctcccacctgtacttcatcttgcttggctcagtcacccggccagtgaaggggtctggtaatagcagaacaaatgagttccaatttctaatttgcctcaaactgaagatgtatatacctggaagtgatttgtctttcttgtatcttatccaaaaactatttctacataagctccaatcatgaaaagtgaatggctatagttgaggagaacagatacagatgtatgaaatgttctgttctgtttttttgagatgggatgggggtttcaatctgttgcctggtgtcgggtggtgcgatcatgatgcactgcagcgctgacctcctgggctcaggcaatcttcctgcctcagccaccacatctggctaatttttaaattattattattttttaatagagatggagtctctccatgttgcccaggctggtctcaaactcctaggctcaagcaatcctcccacttcaaagtgctgggattacaggcatgaaccaccacacctggccacatgttgtttgtttgtgtatatgtggtgtttttgtgtttgtttggttggtttttttttttttttagatggagtttcactctgttgcccaggctggaatgcagtggcgcgatctcggctcactgcagcctctgcctcccgggtttaagtgattctcgtgcctcagcctcccaagtagctgagacgacaggtgcccaccaccacgcctggctaatttttgtatttttagcagagatggggtttcactatgttggccaggctggtctcaaattgctgacctcagatgatctaccctccttggtctcccaaagtgctgggattacaggcatgagccacggtgcccagcatttttttttttttttttgaagcagggtcttgttcttgttctgttacccac

SEQ ID NO: 71 - DNA, 4225 bp, Homo sapiens
ggcctcaaagatcccagcgcactaggagggtggtttgtggctccctgcagtccccacgccccggatccaaacgacagagttcggggactcacaggggcagcaaggcggcagagccgcggagccagtgcaacttctccggcgggaccgcgcccaatcttccccgccgcagtcggggagccccgggggccgccgagcacaggctgcggaccgcggcgggcacgtgggctcggctgcagcgctgcgccaggcaccggctgctcggctctgcccaacctctccgctcccgcctcggtccctgcctctggggagagggttcctccccccttccactttgcaccagtccgagggaatttgcggtcggtgacgcgcatccttaagagagccacctgcagcgcgaggcgcgccgctccaggcggcatcgcagggctgggccggcgcggcctggggaccccgggctccggaggccatgccggcgttggcgcgcgacggcggccagctgccgctgctcgttgttttttctgcaatgatatttgggactattacaaatcaagatctgcctgtgatcaagtgtgttttaatcaatcataagaacaatgattcatcagtggggaagtcatcatcatatcccatggtatcagaatccccggaagacctcgggtgtgcgttgagaccccagagctcagggacagtgtacgaagctgccgctgtggaagtggatgtatctgcttccatcacactgcaagtgctggtcgatgccccagggaacatttcctgtctctgggtctttaagcacagctccctgaattgccagccacattttgatttacaaaacagaggagttgtttccatggtcattttgaaaatgacagaaacccaagctggagaatacctactttttattcagagtgaagctaccaattacacaatattgtttacagtgagtataagaaataccctgctttacacattaagaagaccttactttagaaaaatggaaaaccaggacgccctggtctgcatatctgagagcgttccagagccgatcgtggaatgggtgctttgcgattcacagggggaaagctgtaaagaagaaagtccagctgttgttaaaaaggaggaaaaagtgcttcatgaattatttgggatggacataaggtgctgtgccagaaatgaactgggcagggaatgcaccaggctgttcacaatagatctaaatcaaactcctcagaccacattgccacaattatttcttaaagtaggggaacccttatggataaggtgcaaagctgttcatgtgaaccatggattcgggctcacctgggaattagaaaacaaagcactcgaggagggcaactactttgagatgagtacctattcaacaaacagaactatgatacggattctgtttgcttttgtatcatcagtggcaagaaacgacaccggatactacacttgttcctcttcaaagcatcccagtcaatcagctttggttaccatcgtagaaaagggatttataaatgctaccaattcaagtgaagattatgaaattgaccaatatgaagagttttgtttttctgtcaggtttaaagcctacccacaaatcagatgtacgtggaccttctctcgaaaatcatttccttgtgagcaaaagggtcttgataacggatacagcatatccaagttttgcaatcataagcaccagccaggagaatatatattccatgcagaaaatgatgatgcccaatttaccaaaatgttcacgctgaatataagaaggaaacctcaagtgctcgcagaagcatcggcaagtcaggcgtcctgtttctcggatggatacccattaccatcttggacctggaagaagtgttcagacaagtctcccaactgcacagaagagatcacagaaggagtctggaatagaaaggctaacagaaaagtgtttggacagtgggtgtcgagcagtactctaaacatgagtgaagccataaaagggttcctggtcaagtgctgtgcatacaattcccttggcacatcttgtgagacgatccttttaaactctccaggccccttccctttcatccaagacaacatctcattctatgcaacaattggtgtttgtctcctcttcattgtcgttttaaccctgctaatttgtcacaagtacaaaaagcaatttaggtatgaaagccagctacagatggtacaggtgaccggctcctcagataatgagtacttctacgttgatttcagagaatatgaatatgatctcaaatgggagtttccaagagaaaatttagagtttgggaaggtactaggatcaggtgcttttggaaaagtgatgaacgcaacagcttatggaattagcaaaacaggagtctcaatccaggttgccgtcaaaatgctgaaagaaaaagcagacagctctgaaagagaggcactcatgtcagaactcaagatgatgacccagctgggaagccacgagaatattgtgaacctgctgggggcgtgcacactgtcaggaccaatttacttgatttttgaatactgttgctatggtgatcttctcaactatctaagaagtaaaagagaaaaatttcacaggacttggacagagattttcaaggaacacaatttcagtttttaccccactttccaatcacatccaaattccagcatgcctggttcaagagaagttcagatacacccggactcggatcaaatctcagggcttcatgggaattcatttcactctgaagatgaaattgaatatgaaaaccaaaaaaggctggaagaagaggaggacttgaatgtgcttacatttgaagatcttctttgctttgcatatcaagttgccaaaggaatggaatttctggaatttaagtcgtgtgttcacagagacctggccgccaggaacgtgcttgtcacccacgggaaagtggtgaagatatgtgactttggattggctcgagatatcatgagtgattccaactatgttgtcaggggcaatgcccgtctgcctgtaaaatggatggcccccgaaagcctgtttgaaggcatctacaccattaagagtgatgtctggtcatatggaatattactgtgggaaatcttctcacttggtgtgaatccttaccctggcattccggttgatgctaacttctacaaactgattcaaaatggatttaaaatggatcagccattttatgctacagaagaaatatacattataatgcaatcctgctgggcttttgactcaaggaaacggccatccttccctaatttgacttcgtttttaggatgtcagctggcagatgcagaagaagcgatgtatcagaatgtggatggccgtgtttcggaatgtcctcacacctaccaaaacaggcgacctttcagcagagagatggatttggggctactctctccgcaggctcaggtcgaagattcgtagaggaacaatttagttttaaggacttcatccctccacctatccctaacaggctgtagattaccaaaacaagattaatttcatcactaaaagaaaatctattatcaactgctgcttcaccagacttttctctagaagctgtctgcgtttactcttgttttcaaagggacttttgtaaaatcaaatcatcctgtcacaaggcaggaggagctgataatgaactttattggagcattgatctgcatccaaggccttctcaggctggcttgagtgaattgtgtacctgaagtacagtatattcttgtaaatacataaaacaaaagcattttgctaaggagaagctaatatgattttttaagtctatgttttaaaataatatgtaaatttttcagctatttagtgatatattttatgggtgggaataaaatttctactacagaattgcccattattgaattatttacatggtataattagggcaagtcttaactggagttcacgaaacccctgaaattgtgcacccatagccacctacacattccttccagagcacgtgtgcttttaccccaagatacaaggaatgtgtaggcagctatggttgtcacagcctaagatttctgcaacaacaggggttgtattgggggaagtttataatgaataggtgttctaccataaagagtaatacatcacctagacactttggcggccttcccagactcagggccagtcagaagtaacatggaggattagtattttcaataaagttactcttgtccccac

SEQ ID NO: 72 - protein, 989 aa, Homo sapiens
MPARDGGQLPLLVVFSAMIFGTITNQDLPVIKCVLINHKNNDSSVGKSSSYPMVSESPEDLGCALRPQSSGTVYEAAAVEVDVSASITLQVLVDAPGNISCLWVFKHSSLNCQPHFDLQNRGVVSMVILKMTETQAGEYLLFIQSEATNYTILFTVSIRNTLLYTLRRPYFRKMENQDALVCISESVPEPIVEWVLCDSQGESCKEESPAVVKKEEKVLHELFGMDIRCCARNELGRECTRLFTIDLNQTPQTTLPQLFLKVGEPLWIRCKAVHVNHGFGLTWELENKALEEGNYFEMSTYSTNRTMIRILFAFVSSVARNDTGYYTCSSSKHPSQSALVTIVEKGFINATNSSEDYEIDQYEEFCFSVRFKAYPQIRCTWTFSRKSFPCEQKGLDNGYSISKFCNHKHQPGEYIFHAENDDAQFTKMFTLNIRRKPQVLAEASASQASCFSDGYPLPSWTWKKCSDKSPNCTEEITEGVWNRKANRKVFGQWVSSSTLNMSEAIKGFLVKCCAYNSLGTSCETILLNSPGPFPFIQDNISFYATIGVCLLFIVVLTLLICHKYKKQFRYESQLQMVQVTGSSDNEYFYVDFREYEYDLKWEFPRENLEFGKVLGSGAFGKVMNATAYGISKTGVSIQVAVKMLKEKADSSEALMSELKMMTQLGSHENIVNLLGACTLSGPIYLIFEYCCYGDLLNYLRSKREKFHRTWTEIFKEHNFSFYPTFQSHPNSSMPGSREVQIHPDSDQISGLHGNSFHSEDEIEYENQKRLEEEEDLNVLTFEDLLCFAYQVAKGMEFLEFKSCVHRDLAARNVLVTHGKVVKICDFGLARDIMSDSNYVVRGNARLPVKWMAPESLFEGIYTIKSDVWSYGILLWEIFSLGVNPYPGIPVDANFYKLIQNGFKMDQPFYATEEIYIIMQSCWAFDSRKRPSFPNLTSFLGCQLADAEEAMYQNVDGRVSECPHTYQNRRPFSREMDLGLLSPQAQVEDS

SEQ ID NO: 73 - DNA, 115050 bp, Mus musculus
  misc_feature (1)...(115050): n = A,T,C or G
tctccctccctcccacccccaccccatgtgtggataaagatgcaagctttcggctatggctccatgtcacatctgcctgttcgctgccatgatccctaccatgagggcctcagattcactctctgaactataagcccctaataaactcattccataagctgccttggccatattatcttatcccagcagcaatagaaaagaaactaaaacacagaaatgtgctctgaaaacctctctctctctctctctctctctctctctcattctgcttttggcttccataagggaaacaggtattctgcacctatcactacctctatgaggtactatgctgccatagggctgagcaaccatggactaaagtctctgaaaccatgagccaaaaatagatagataggtagatagatagatagatagatagatagatagacagacagatagatagatagatagacaaacaaaccttctgtccatataagctgactatctcaagtgttttatcacagtaacagaaagcccctgaacacctcccaagggtgaacactctcaatgattcataggaaagcccttagatgaggtgcttgtggccctaagagagctggggagaagggaggagctgagatcacccactcagggctgtgacacaggaagagcagggacagacagaggctgtctctcttggcttgtcccagcctggagcctgagacacatcttgttaaaagtatgattgaggtttacagtcaaataaacagacctccagtttcacctggcaggtacacgcctttagtcattaagtagtattagggatgtttaattaatgtaattataacacaacaggaacaaggccatctgtgtcatgtctaaagaacacacaagaaccaaggaaacaagctgagaagcccgtattttaaaatcttggaacactagagagaagatatacttccattgataacgagccacgtaagcgaggggatctggcttcaatccccagaacttacgtagaataaacaaacaaacaaacatctgggcacagtagtgcacttcagttcccagaactataacagaggagacaggcagattctcagaacttgctagtcagccagccaagcctggccattcagtgagctccaggccactgggagaccctggttcaaaaaaacccaagctacttgagaatcaaatccctgggcgactgtagcttccagacacatgcagacacacaccccattcgcccttagcttcgaagcttcctggtgagtctaactgtcccagtgggtcccaccggaacccagaggcagccaccatctttttgagacagtgtctctcattgacctgcaactcaacaattaggctctgatcctctgggatctgcctgtctctgtctgacatcccaggactgggattataaacacgtgtgacagctgtgattcttgttaacctggccacatctggaattaactaaaacctaagaggctggatacacctgtgaggggttttttcttaattcatttgaagagttaagaaaccaccttttatccggatctttgaggtgggaagatccacctttaatctgggccacagtttcttgtggtgacctctgtaaaggacatggaagaaggaagcttttgctctccctttgtttgctttcctttattggcaactccattccttcactgaccacttcttgggattctggtgtaaactgaagagcagctgagatatcctgtttcattcagtaaactactactagactcttggactttctgttggtagacagccattgttggactagctggatcacatcctgtaagccactctaattatatatatatatatatatatatatatatatatatatatatatatatatatcttagttagggttttactgctgtgaatagacaccatgaccaaagcaactcttataaggacaacatttaactggggctggcttacaggttcagaagttcagtccattatcatcaaggtgggaacatggcagcatccaggcaggcacggtgcagaaggaactgagagttctacatcttcatctgaaggctgctagcagaatcctggctcccaggaagttaggacaaaggtattaaagcccacacctactccaacaaggctacacctcccaacagtgccactatctgggccagcatatacaaaccatcacagtatacataatttatatataaatacatataataaataattcttatataaaagtaaatacatatacatacatacatacataaatacacgtatacacatatataacagatacatatacgatttagatatacagttatacatattcactctattagtcctgatctgttcctctaatatggcatgcaccccccacgcttagctttttacgtgacttctgaaacttgcacttaggtccgtatgcttgtagcacaagtgccttacggacagagccatcatcctaccctggcatgtggtgctttcactggaagcatgtcatttcctctactgtatctgatcacgtgtgtgaagagtcttgattgaagagcggctggctttcaagcacagaggctggcagagtttgcagattctggcaggaaagaccgcccagcccccacgggagtcacagacagaaaccacaggctgtgaagaagacactgaggccttccacatttctcttcaaagaaatgtcctcttcaaatggcactgtaatcacacgtggcagcacgaccctacacgcagtgtttgtactggacagacaactgcagcctttgtattgctgggggcagaggtcagcttggggcagtgtcttccaaccagaagagagagagagagagagagagagagagagagagagtgtgtgtgaatgtgtacatgtgcacatactgcctgtggaagccaagaggataattcaccagctaccatctgcctcagttttcaagacagggtctctcacagacctggaagttgcttagtggactaggctgactggccatcaagctccaaacacctccacaaccctggaattacaaccctgtgctttttatattttatttctgttctttttaaacatgggtttggggaaattgaacttccacttcttggattgaattatcacccaagcagctcaaagatttcttttatttttttattctgtgtgcggggaagggtatgtgcgtgtgtccgtgcagttcagaagatgtcggagccctggagtcaaagttacaggtggttgtgaatcaccggatgtgggtgctgagatgggtcctcaggaagagcggtgagggatcttaactgtgaagacagctccagccccctggcaggatttttgatattttctataacaaccaaaaccctggagcctggagcaagccttccgttgagatactgagagtcagacaggtcgttctttattaccatcatctttctctggcagatgtgctttcctgtgctctctcgtggtgtggcagtgttttctgatgatgttagaaggccgacccacagagagctgttgctggtggctttgcagagcgcttacatcattccacgcccaaagcaaagatgagtcttagctgttccacgtgcttgccagtgctggggagggaaattttagtttttaacatattttttttttttgagacctggtttcagtctatagttcaggctggccacgaactcatgatgattcagcttcccaagtgctggggtcatagaggcacgagctgcttaatttcagatattctgatccgtgagtatgttcccgctatctctgtaacagcagggggtggggggaagggagctacagtgtactcatcattattgcatgattatctcccttcctcagtatagattgattgatttattttagtatatgagtacactgtaactgtacaaacagttgtgagccatcatgctgggaatttaggacctctgttcgctccagtccctttgcccagctcgctctggcccaaaggtttatttattattatttttaagtacactgtagctgtcttcagacacaccagaagagggcatcagatcctattacagatggtcgtgagccaccatgtggttgctgggatttcaactcaggacctttgggtggctcttaaccattgagccatctctccagccccccttcctcagtataaatggcttctagctggttacatacttgcccggcgagtgaggaccccacgctttcctcatgtcaagagtcttgtaactctgaagaagcctgagtggtccacaggttggacttgggtgccagtggccttgagcaggtcagcctctaaacagaaccggaacggactagaggaagaagcgagagagaagaagggagaagccctaacagtggggacctgactgcacctgggagactttggatggcagcagatgctacaaaatgaccactgcctatggccaagattcctgtttgagggaaaagccatacaagtattatgtgagaagctggaggtcaaagacacccctccccacctcctgtcgccgcccttgccacctcctttagaaaaaagtaacccaggtgttgctctgtatctgtacctagtggcaggattcggccacactgtaggcctaagcagaaaagttttagaaaacaagtaccctaccgggagactgggagaacgtggtaggagaaggtgcagaaagaatgtaggatccagaggctagggactacagccatgaaagggtgcatgtgacattgtgctcctgaagtgactgtggctctagaggtctgcacaagacctgtactaaactaagtcaacaaggctggtcaaaatcctagttggtagtactaattggactgggggccgggtgaagaggggagctgtctagaaggaacaggaggcaggaggcagtggtgggaatgactgagattgtataaggaattgtcaaagaataaacagataggtttacaaaattgaataaatattctttctcagaggaaagctttcttcctaggatccacacagacacaaaaccatagacagtcacatctgtcacatgtttaatgtttaatgttaaccagtggaaatcatagcggtttccatatgtcagttgccatcaggcctagaacattgggtagttattgtgatctcagaacagggactttctggtcctgctgctctgaggaagtgaagagaccacacttagcaacatttagataatggtttcccttgagccttgagatgccaccaccaagaaacaccaagcatagctcagagaagagaggaaaacacccagaagaaatttcagtggaagctgatgtaggtaagctccaactggtggtgagagatattggggtaacatcctagctgctgagtagagttggggaacacttagttctgttgagtatcttgggaggaagtgacaataggtatcagacaatagacaaaggggggtgggggacagggaggtcccatggctctggcagctggtggcagcttcaccttgaaggtcaaaaagggcgatgctaactaagctgaggtgggtttgcgtgagagtctcctctcctgtcccccgtctttgccacagtcactgagtcagttctcccgtggttgcactgaagcaagacacagcctctttggaagatgagaaagagcagctttgtgctgtgtgctcagggaggtgggaagtacgacagtaagagcctgctgagggctagattataggcctgaagccgatgcagttagcactctggcttgacagctgagatgcagggagagggaaccagcagtgctgtcaagggcaagcagctcccccggtcctccttacactctgttgccagggcagctctgagattcccagggcacgctttagggaagagtccttcatggcttgcggggaggacgaggggcccaggaaggcaccaggagcatccggaggcctccgagggcacccagggatgacggacacttagcttggggaggctcctcaggtaaggtagatcctgaggttgtgaggggaagaaacatggacaggatgggggtggcagctaccttggaggtaaaataacttacatgctgtctcatgctgcgtatcacatccagaagacatctcccggggaccagggagacaccgtgcttacgtgacaagcagagaaatcaggcttctacccctagaatccatgttaagaacaataaccaagctggtgtggttgtaatcccaggctgtggaagcagagacaggtgaattccttaaggagttttggggactcaccagccaaccagccatccagctaggcaggcaggcaggcaggcagacagacagacagacagacagacagactactctgaaagctacaagccagtaagagaccctatcataaacagcaacaaaataaagatggatggtgcctaaggaatgacactcaagattgtcctcgggccaccatacataggacatgcacccacatccagacatagacatcttatatttcctgaggcagatgccaaccactgcaggtggataggtatgtctctgttcagtgaaacaaccctgggtagccatgctgccctgttctcctggcatgggagtgccccacttagatgcctggattcagcctccagccagccttgggtacctcctacttcacatggtgatgtagacgcctggagccccagggctctgcatatctgctcaggggatagtccaaagccaagtccactgaagctatcacacttgggagtctttctcccttgagattcaaaccttatctctggagttagcttgctcagctggacggagaggacgccagtattctcatagaaagatgtagaaaagtatataaatctctaagaactcgacatttctgggcaaagagtatgcttgaagctagctagaggggagggtaagctagtcagagtggaggcaggcagccttgggttcattttgtgatcataaacttataatcaagacaacgatacaacgttggctggagagacggctcagtgggtaagcacttgctgctcttgcgaagggtttggttcccagcctccatggagaacattcacaagcacctgtaaaactctagctccaggaagcctaacagtctctgttagtctctgcaggttctacatgcatgtggtggacacatatacatgcaggcaaaacaaacatgcatatacttaaaatcttaaactgggcagtggtggcacacgcctttaatcccagcactcgggaggcagaggcaggtggatttctgagttcgaggccagcctggtctacagaatgagttccaggacagccaaggctacacagagaaactcggactggagttgaacctagaactgtgggccccagaacagccatgccatggtctctcctgagctctgggctgccctctctcatgggcctaaaagccaggagaagtctttcccttattgatgaccctttagctacagtcccccctggcacattccctcctgcccagacagtgtgtctgagggcaggctcccacgggggcagtcagctcagagatcactcagaatctctctcaatgggagcaagccgctttcacgtttaatttgcacctttatgtccggttctgctgttcatgatccaacagggattgtgctctaggcactttgtagctgtgtggatcccactgccttgtgctgtacagagggattttccaggctagaggctgctagtgtctctgctgccccacccctatccgcaggatgctgctggctgcccaagcaagggagcaatattctagatgtgcatctcctatgatgataaatgagagtctctttcatctctgtaacacttacatttgtgtgtcagcatcctaggtgtatcttccttcctgggatataggatgctgttaaataagcctaggactaacctgtccctgcagcactgtggtccctataagaccaagacagtggtggaccaacactcagaatcggaagagaggttggagacgcatcctctctgtttctttggaatggtcaccatcacagaactgggaggcagaactcaacaaactttacccactgttccctggccagggaattttcttcagggtagatctacctgtcagtgcttggatcagagagtggaataggtcaaggtctctcacctgtttctctcatggaactcattagagaactgaggcccatgccaggagtggtggcgcacgcctttaatcccagcactgtggaggcagaggcaggcggatttctgagttcgaggccagcctggtctacagagtgagttccaggactggcagggatacacagaggaactctgtctcaaaaaaacaaacaaaaaccaccaccaccaacaacaacaaaaaaagagaactgaggcccaaggtcaacttggaagcaagcccccagctgagttttgtcaggttctagattcaatgcaggttatgagcccccctagagcactggtcggcaaccttcctgatgctgtgaccctgtgatagtgttcctcctgttgtgatggctccccaaccataaaattagttttgttgctactttgtaactgtaattttgctactgttatgaattataatgtaaatatctgtgttctccaatggtcttaggtgacccctgtgaacaagaccttcgaattcccaccctcaaagggttcttgacccacaggttgagaaacacagccctagagcaaagacaaccgaccctcctctggttggttctactgttttgacctctagtaggcctattgtgctctctgagccagcactgactggcacacctaacctgaagaagcttcctggttctttctaggaccttctatcctttaggaagggcttgctcagtttaactgctgtcagctgcctgccttcccaacagcctcatccctgctggaagcccctaagggccttctggaattcaggaagccaccagtctgcctagagactggtcttgatctatttcttggttcttccggcaggttcattaaggaactgggtttccttttagggagggactgtgtctctgggcagcacttcccacctggccagttactgtgtgaactgagggtcacttctcccttcaagggcagaaaaggacatgccctgtggctgcagtgtgtgtgtgtgtctgtgtgtgtgtacccatgcaatatgccatgaggtcaacccaggtgttgtccacttagttttaggagacagggtcccttactgaaatctgagtctgacttcggattaagtaaggcaggctggctggccagtgaactccatccagggttccaccaatagtctctgcctcaacactgggattacaacaaagcaccactgtctgggtttttttttaatcataggttctggagcaccaacctcagaaagcatgttaaggacctggctatgtctaccctttgtaccaaccaacttcggaaggcccagaattagttagaaatgtatctcatcgggagctgcatacaggaagccttggtccatgggaagaaccacccacaccttgcattgagaaccccaaagggtctatcctagatcataaaggtaagagcccagcatctctggggtcaacgctggtgaccccagagcatggggcacaggagactttggggacctggacgagcaggctggatcattaggaggctgaaaggatcaaaaggctccttttgctggtaatctcctctgttttcaagagaccagacttgggtaggaaagagcccctggggtctggaccatggggctttgggggatgggggnnnnnnnnnnnnnnnnnnnnnnnnnnnnnnnnnnnnnnnnnnnnnnnnnnnnnnnnnnnnnnnnnnnnnnnnnnnnnnnnnnnnnnnnnnnnnnnnnnnnnnnnnnnnnnnnnnnnnnnnnnnnnnnnnnnnnnnnnnnnnnnnnnnnnnnnnnnnnnnnnnnnnnnnnnnnnnnnnnnnnnnnnnnnnnnnnnnnnnnnnnnnnnnnnnnnnnnnnnnnnnnnnnnnnnnnnnnnnnnnnnnnnnnnnnnnnnnnnnnnncacgctagccccgcgccctccttccccacgccggcctccgctccctctcgcgccgcagcatctccgcgcgtctcccggcctccccgactcaagctcctggcgccgttcgcctctgtcgtcgctgccaccaacgccgccgccattcttggcgcggagctggcctggccagcccccgccgagagcctccgcgggtcggacgcgcgctccaggtaagcgactgggccggcgcgggaggagcgcgcgcggggttgggcaggtgcgcggagcgcggcgagcccccgcggtaaacctaggaaccctgttggagcctctcctgcgaccccctcggggctcccaggatccctctccgagcttcttccccaggttctcccacaccgctaggacctagtctgcattcccacctggatgcccccggactccctctgcgttcgcatcaggatcctttgggtcccctctgagtcccatccggattcctcacccccctctacatttccaccgcgttttccagaccctctctgcagttccaccccagcccggatctctctccggcgtcccttccctagctcccgccaggccctggcaggcaggtggctggagcagggacacgggacaggcagcggatgcgacttgaccagccaggccctgcacgctgggacccccgggtgctgactccttgatcggtgcctcccaggtcaggcccggtgcccgtagccgggctcccagccccggcctaaccagcttctatttcggtctcccaggccttggctcgggtgcaccggatgtggcgcggtgcactcagacaggtgcggccgcggtgaggttgccaccgccgggcagtgggcactgcaaggcggtggcttcctggaagattcgggctgcgttattctagaaccgcccggaaccaccaccagctttagctcgagctgcacctgttgctggcgcccgatgatttgcagggggctggttctgttggggctcagccagttatggcttggggaaaaaaatcagccaaaaaacaaaacagcgctgagcacgtagctgccctctatatgttttctgtttagtctctctgtgggtgaatgtggagttttggctttcaatgaagcatgtggtgaaggcctgcccctacatactgggtcatttgccacatgaacttgtcctgcttttgttttgaaaaccctcactgtgtggagcacagcccaggcccgtgggtggcccaacctctcactggactgggggcctgtagccagccatctgacccagctgtgggtctaccaggcgctaccaaacggaagtttccttcccaggagggtgaagtgacaccagcggtctgtcacttcatatgtgcccctggcgtctgacttgtctcttgtctgcccaggcaggcagggttatttgggaatgtttacagtgtcccagaagcaggcagtcttgggcagaggtgggggtagatcccggtagcgactataatggcctgattgtcattttgaccgttgctgtctgtgtgcatcacgtcagagcgatcatctgttgagaagcggaatggatagaatagtgagcagggatgttggtgtgggcaaagcttgtctttcctgaccataagactcagttaggtctggctggtccacacagcaagtaaaccaaagaaacagacacacgttgcctataccagttgtggcattgccgttcttgcacgatggatgtgcgacctggagccagggcaagagtcagaggctgccttcctgtgatgggcttgtttaagtctgtcctttgaaatggagctgcgaagtccctctgtctatagactccaatgacttctggctgtcattgtgtgccttacagagactcctccccagtggttggagtcttggcaggtggctgcctgccctggactgagggatgaggtgcctggtgtggaccgtgctgcctcaggaatccagggggtctggggccagggcagtgtgtctggtgacatcatccacttgtggacagttgcttctctaggctgtcttttatggacagtgtccaaggaggcctttcccaccccaggcatggtgtgtggtgggccagggctatgggaatgggtgctaatggacagcatgatcaataatgcatctcaaagatcaatggttttctttagccatttgaggtgtttctagagggagcctgccctgggagggctaggaaggctgaggagggggacagtttcctttgattcgattatgtttagggtgagcttagagccagggaccctgggtttgagccctccagaacatcttcactataccagaagaggatttggaatttcctcattgttgttgtttaaagcaaactgttccctcgagtttggaaaagatctccctcaggctctctgttccctaggcacccagagagccatagcatgagcttggtggtcatgccaaggtggtcttggggggaaaaaaaccctgctgctagaattagccaacagggggcagatcccctccctttcttcctcccttcttccctccctccctccttcagatggagcccaggttgctctctgacctcctgtatcagcctcctgagtgctgggattacaggtgtgggccaccactacccagtttacatctctccaatggtgccggtcccagaaggtccactagatggtgaaaggtactggtgagaggtacccatggggtttacccaggctgagggggagggtccttttggttctcttggctaagagccatcccactcttggcagctgcagtatgagcaacccatctctgcaatctcagttgaagacgtggctgtccctgggtgacttggggtgtggcccagagctaggctggtcaggcaaggtcttatgcacgtgtcggggagaggtttgctggaccacggtgcaattctcttgtctggaggacatgcagaaagaggtggcaatcttgtaggaggtacaggttaacctggtctgtcaaggggtgaccggaagaaacatagaaagaagtggcaatttgttaggagatatgagtttcccttgtctttctaggggtgagctgctgggccttccccagaacagataccaaggaaggggatttgggggaagagccaggtgtggctgttttgctcttgggaccttgctttccagctgtgctctttcctgagtcccttttgtgctcacctgggatgccacatcatggcacatctgttgctgctgacccaggcctggacagcagccgtactttctttatttcttgcagggggcttgtaatttggtttaaactctcacacactgcccgtgagagcccgggttgcgtattttttctgaatggcttctggaaggcacttgtagattgcaggcatcctgaagcctctaacaggagtccctgacagagctaggccgtgagacagacatttgctacatgaacaatggtatggtacgagggactttttttaatgaccaccatgtggttgttgttaccaggggtgcacagggtgctaaaggatgcttgggatctgcgttgtcggatcagggaggggtctgggtgagcgtccctgagctcattactctttttctggcttctgttgtgtaccattgaaagtactccataattaaaagttaatagttgagggccaagtggattgcttacatgaagcagctgcgtaagggtttactcgaaacttccaaccttccgtgcagtgcattgagtcatcctgtttacacaagtgggcacttatgcatggaagtggtctcctacgtgaatatagacagcaccgttgtgtcttcgaggatgccccccagaggttgagtaggtaatggtggtaggggggcatctcatggaccagggtcaggcacgttgaagttagtgggaatgtgggcacaggggtgactgtctgcatgtatgtgccaatgtgtgtgagtaacggagtcagcgtgtaagtctgtgatggttgtgtgaagatatcagatggacagggtaaaagtggaagcctgtgaattgttgtgtgtctgtgtgtgtgttaggggacgtgtgagcatgtgtgcaaacttgtagtgtgacttgtggtgtggaaacatcttctatgtttctttggccactttgtgttgccaaacctcattactgtggtgtttggggtcatttttaactaaagtaaggcgtagctgaactgtcctgtggggtggagttgatctgggcactgatgaacgtgagtaaccattggcaagtgggacacactgtgtggatactctggagaaaaggaaggcagacagtgccggtggggtggaattgtgtgtaatttaaaccttatgaattatttatttctggaatttttttattcagtatttttggactgtaattgactggaaaccgaacctttagaaagcaaaagatgaaggatgtactgttctgtggatctccgttgtgtgtctgtgctttgcctctgcactgggggctctggaggcttatgtgagtcttgggtgccagtgctcggagctctttaaggctgaagggcgctttttgggttggcagtactgtggttggtttgctcatctctcggtagatgtttggattgtttcctgttaaagggttaggagctagaactttgcaacagaagggcagataacctgcaaatagaagcacatggccagccagccagtgtcattagtcactgaaagatacaagccaagacccagctcttactgcactagaatggcgttgatacaaggggttgggagatagcacctgttgttaaggacttagagaaagtggaaccctggggttgcggagaggggaagatggtgtttggggaaacagtatggaagtttcttggaaagataaacacagatccaggttccttgtgatccagctattccacttttatacccatacctaaaaggatcggaagtagggactaaacaaaagcctcccaccaccatttatagcaccgttcacaagacagcagatgtggaaacagcctagcttgtccatcagtggatgaagtgggtgagccagatgtgccgtgtgcaggcatggaataatactcagccgtagaaaggactggaacactgatacatgttcgaaccttaaaataatagaaccttgaaacactgggctaagtaaaagtagccacagctaagacaatgtgactcaagaatcttgtgtacaaaatgtcagtacaggaggcccagctggagtgccagaaacatcatcagtcaccgggggtcgggagagggatggggtgggactgcttggttttatagggcttctagttttcttttgttttgttttttttttttgttttttttttttttttagtgctgtggatttgatgccctcccccacctccaccctcattttgtatgctaggtgataaaacataatagctgataatggttgttgtgatgttgtgattgcatcacaagatgctattaaaggataatgtgtgtgtgtgtgtgtgtgtgtgtgtgtgtgtgtgtgtgtgtgtgtgttttgcatggtgcatgtccctctgcatgcttctctggaagccagcacaggatgttttcttttgtccctctttgcattcttctcttgagactgagcctgtctctaaaccagaagcccaccactttggatagctggctggccagcaagttctcaggattcccatgtcgacagcccccagcctttcccatttcaaagtccagtcctctgatttgcagaacaagcactctcacccgctaagctacctctgcagctccctaagtatacttggtcacagtaaataatatacagaagtaccctgtgccttcttagacaaatcttactggggttgtatattttctcctgtagactggtcactcaccaggggaggaatctcagggttttgtgatgtgtgtgtgtgtgtgtgtgtgtgtgtgtgtgtgtgtgtggccttttgaagaacctggtagcatttttaatgacaattgtgtgggttttttcatcccccccataaaggagatgcagcaattgatacgtactcacttggcttgttgacactcgctgttgtcagtctaactgtaagttattctagtgggatgttgcagtaagggggagattctagttctgagtctccccttaatatctgtttcgtttgtgtgtttgttgaggcaagctttctttgtgtagccctcactgtcctggaattcactctgtagaccaggctggcctcgaacacacaaagatctgagtactgggattagaggtgtatggcaccgcctggctttcttgttcatgttaaaactggatcatttgtcttatttgggtcgtaagagttctggttccaaattagaatctgtcagatatttgtattataaatattttttccatctttgcatttttatcttattagtgatacctttcaaagggcagactgcccaactcactaactttttatttctttttaaggaaggctctcatgaagcccaagctggctttgaactcactttgtagctgaggatggctgtgggctcttgaccctgctgtcttcatctcccgaatgccagggttatatgtgtgcacctctaggcctggcttcaatgtattgtttttagatgggggtgttagtgtggttttcctttgctcgaggtccctcagaggcctaggggtgcattggaattcctagaactggagttagaggtggtcgtgagctgcctgggaatctgggtcctctgcaggagcagcaagtgtccttaaccactggccattcccccttggaccttctatgttgctatctggaacccacggggaaggctcaggcagacatttaatttgttgttaaatatggtgttagtggaatattttagcccaagcttttagagttgtagtgtgttggtgtcacatgaccagcagcctccttggggagggcagggctcatttggcttctgcttccaggttacagtcctttggaggaaaagttggcaggagctgaagcaggaggcatggtatgacgtgctggtatgctcagccagttttcttatacagcccaggaccacttacagaggaaatggtgctgtccatagaccctctcacatcaatcagcaatcaagataaatccttacagacgtgcccatgggccgatctgtcctgagtttgaacctaggactttttaacctgcttgacagtcactgtaacaccacgcttatgtctggccttctttctagtcctatgtttggagacaaggtctccctaagttgcttgaactgttgttcttgaacctctgatcctcctgagaagttggagttacaggcctggtatttgtattacctactctttttagctattatatagtatctcttatacatgatggatgaattttaggattccatgggtgtcagaaattaccatagtacatatctataagtgtattttttatgtacatacctatgaaaatgttttcttacattagacacagttagagttgaacaaaattaataataaaatcgacccagtttcagcaccgcaccgtattggcagttatgagaatgtggttcttgcctttctcaaggcggcttattgtactttcatgtagaaggaacacactcagccatatcctgaccacaggtgtaaccgcagcatccaagaaaccgaggcagggagatggctgtgagttctggcacattactgctggtgaggagcattcctgagttaaggcacggggcagctggagtagttagtcggtagctgaagcaactgcagagtgcctagcaggaggatgctgtatacagtgtggatacgctgcacaaaggaatgtggcccctgcgctgagagcagcctatgctataatgagctcttttttaaaaaaagatttatttatttatttattatctgtaagtacactgtcactgtctttagacactccagaagagggagtcagatctcgttagggatggttgtgagccaccatgtggttgctgggatttgaactccggaccttcggaagagcagtcgggtgctcttacccactgagccatctcaccagcccgctgatgagctctttattctggaattttccatggcgtatttctggactctggttgaaggtggataacggaaactgcgggaaccagaaccacagttaagagacagttctaaattgccaggtttaagatttatagcactcttcatggggcaaatgtttttgcgggctcaatatctttttttttctctctcttcaaagtatgggtgtattagtgaagccaccagagtctgaggttttcttcttggtgaggcttttaataatgacattgatttcttgctcttaagatggtctgtttctgctaggttgggttctgataatttagatgatttattgtgataaaatgtgaggacagtaccttctaccctgtgaaagttccgttctgggagttttagtcagtgcctgtcagcatggagtcgtcacccgattcccagaattccatgctttcttgggcctgtttgaagtcagatcctagcctagcactggctgccagggctggttttctgttcttacagaggtttccagggtgtcaggtgaacacgtctggcagttgtggcacggagtctggcgcctgccactcctacacttaccttagcagtgactgaggtgatcgggtccatgggtagaaagactagcaagatagctcagtggtaaaagcccttgccatgcaggacatgatgacccgagttccatccctggaacccagagtggttagagaattgactcctgacatcccttgatcatcccttggtcatcgtggggcacaacacgtgtgctgatgcacacacacacacacagaaacacacacacacacacacacacaaacacaaataaataaataaataaatacattctttttaaaagacttcatttctgagcactgacttgtaagggagggatcagaagtgggcatcagggacaggtaagaatggtcccgtggttcatggtggcttgtgtgtgtgacacgcccaggagctttttgcccattctgtgggatccccaccacacccctcaacctggcccagctcttccccaccctttacagctgaagaccttgacagcacaggaaacttattcttggggcccctccgccaggaagtagagacgctaaggttttcactaggatgccgaggccccgtgtgcaagcatgccgtccatgtgtggtgtcattcctcagttgccattttttgagacgaggtctctcactggccagggggcttgctagattagaccagagtgactggccagctagcctgaaggatccatctcggcccacttcctcattgctaggttcacaagcacatgccaccatgcccagccttttgtgacacgggttctggggatggcacttaggtccttgtgtttacaaagcgagcatttccccaaccatctccacaggcccctccctccattgcattttacttaaaagttttcatcctgtgttaaaaaccctgcctcggcgtggtgtggataggttctgcaggagttagtgtgcgtcctctgggtacaagtctctgattcctgtgtaaactcgctgtgatcaagctccttcccctggcttactcctcatctggcttatccttgggccctcaggtgcctcagacacccagagccaacagcagcattggagctattgcagacttgtgcttggatcacgctccagaaactgggtcacagcagagctctgagcaggcggaattggatctctgcttgtgtttgaaggcagagggcagccagcggcttgggtttcaagtgtggaatctggagaaatcaccagctccctcctcctgcttctgtgagcccctagctttgtctgtcatgtctggcaaggaaaagatcatccatccccagggcgctgtcaggctggcttgctttacccactgctgggcccaaccagggaggtggtcagagccaatctttaaagtagatacccatctcggaagagcctgtggggagtcacagattcccatttatatacaaagtaacatctctgtgactctgtgacgtggacgtggattttatttcagcaggaaaaaaactgttgtgtgaaatgagcagtcatttctgcagagcttagaagacacagcccagacatctccctatggaaatggtggggggactcaggctggggaggggctccgtgtgagctggaagactttgagtttgatccctagaacctacattaaaagttccccttgaggagctgtagatgcaggggggctagggggtgtgtgtctcactggccagccagcctagcctaaaagctgagttccaggtcgcagtgagatactttgtttccaaacacagtctgaacgatctgggaatttagatggcttagccagcaaaggtacttactaccaggcccagtgacttgtgtcccatccctaggacccacatggtggaagaagagaagtaacttctgacccatctcctctgatgtccacacactagtagataaaagtgtagaataaattttattaattcattaattaaaaggtgatggagacggaggaatgacacctgtactggctggttttgtgtgtcaacctgacacaaactggagttattacagagaaaggagcctcccttgaggaaatgcctccatgagatacagctgtaaggcattttctcaattagtgatcaagaggggagggcccaacccattgtgggtggtaccatccctgggctggtagtcttgggttctataagaaagcaagctgagcaagccaggggaagcaaaccagtaagcagcacccctccatggcctctgcatcagctcctgcctccaggttcctgccctgtgtgagttcctgtcctgacttctttggtgatgaacagcaatgtggaagtgtaagctgaataaacccttccctccccctcttgcttcttggtcatgatgtttgtgcaggaatagaaaccctgactaagacaacacctaagttgacctttaaatcccctctttccccagtgcacgcacatgcatgtgcacacacacatacacacatgtgcaaacatgagatggggggaagaagtgatggtgcacagagggctcgggtgtgcgctctcctctgttttgggggacagccagcagagaccctgtctccagagtaactgctggtgtcactagggtgtttgtgcctggatcgtttgggtctgggctattctgaatcattttctcacacttacgttataactgctaaagatggaacgaggctttccgttcaccagcctgggtgctgcgctccctggtgtcacccttccctacgcaatgtgccgaggacctctttgttgcttcaggacacagagcgtggctctgtgtcacataaggcatttgtactggctcctcccctgcgtactaagtggaaggggtatatcctcacaggggcgatctgcagtgctggagatcctgtcttccaggcacagtggggggctacaggcatttgctgctgcatctggcttctcctatgggtgctagggcacctagaccaggccctcatgcatgagcttcaggcagtttaccaaccgagccgtctctccagcccactgcttgttcagagctgacatgaagggcagatttcatggtcaagagaccttgtctttatggttgtcctctacctgaagagtgactgggtgtggctgcttctcagcctctcctctgtagacctgtcccaggggaaccatgacaccaggcaggctcatgtggcctgcaaacaatggtgcttgttgaccactgactgtctgtcataagctcatgggagacgtggtccccgacctggaaggggcatgctctttttgctgccttctcaagcatagtgaaactgtcattcaacccataggctctgatggctttacgttgagtcccctggcccttcatcaaagtgctgcctgcccagtctttgaatccagggatgtagctcagcaggaaagagcacttgctgctcttgccgagttctgtttcttgcaccccaagttgggtggctcacaacatcctgtgtgatggtttgcatatgcttgacccagcgagtggcactattaggaggtgtggccttgctggagcaggtgtggccttgttggagtgggtgtgtcactgtggatgtgggctttaagatcctcatcctagctgcctggaagccagtattctgctagcagccttcagatgaagatgtggaactctcagctctgcctacaccatgcctgcctggatgctgccatgctcctaccttgatgataatagactgaacctctgaacctttaagccagccccagttaaatgttgtccttgtaagacttgccttggttacggtgtctgttcacagaagtcaaaccctaagacagcagcctgtaactccagctccaggatatatataccctcttctaaccttgaaatgcacccacacatatgtgcacatacccgtacatacaaatcattaatttaaaactaaacataaaacctaaataaggaggcaggggcaggacagcaataggttgtggaaatcctgctaatgtctgctcatctcttgtcttcacctgcctatcttctttctccgaccagatgtttgtagatttaccctcagagtacagctggtatcacggccaaattttgccgtgcataaacacagcccgtgtgaggtacctagattcaaggtgagcattgccaggttgcttgggctgacctcactacctacagttctggaggttggatttttctgtgtaactagaactagcctggattgcataatatcctgccctgcctccgcagtgctgggattgcgtgtgtgtgccccactatgtatttcaaatctgatggcacttccctgatgtgtctacggggcatctgtcagcctgtgtactttgctgagtacacaaaatgctttcgctcaccttgctgtctcttttaagttgagggaggtccctaaccaaaatctctgaagtaccccgacttctgaaacttactagtgtctgcatgacagcacaaacagcccacagcagagaacccagatgtgtgcttaaagtgcattttatgttcaggtattgttccatccacatttcattaaggggatgtggtggtgtggttcacagtagaaagacttatctgaaatctgaagcaaaccccagtgtgtatgtgtgtgtggaaacagagtcagccttagttttcattcctcgggtgccatccatcgtgagttgtgagtttcttgagtcttagcctccccagggagagactgattcagtttggtgaggatagctacccagcactgccatggccactttcatccgtctgtcctagccttgcctggtgtctcagtttctcttcctgttgtgttcagatactccaacaaaagcaacttgagggagctggagagatggctcagcgattgagagcactgactgttcttccagaggtcctgagttcaattcccagcaaccacatggtggctcacaaccatctgtaatgggatctgatgccttcttctggtgtgtctgaagatagctacagtatactcataagtaaaataaatctttttttagaaagcaactaatggatgggtttattttagcttacctttcgaggtatagttcattatggtgacaaatttggggtgagaggcgcttcaaatattgggtcacatcatagccacaatcagaacagagacttattagttctcagctcactgtctccattttatacagaccagggggtgcacccctgcccccattaagatggtcttgcccattcaattaatgtaatcaagataactcccacacagtctcacacagagatctgtctcctctgcttggtcaagtggcccacactaaccatctgacgtggtggctcttgggttctaaagcagaaacgaactgtttgtgttctcggcacagagagttgagtgtagtgatatgtgggatgtcacttgcccagccttcataactgagaccagagtagaggcagcagctctccatgggaaggaagaggaaggtgctgtgcacagatgctgggcgggggaggtgtggggcgtgagcacgcaggagaccttctgcaggctgcagggaaggtagccatttttgcatcatgctacatgcgaacactgacttcaaaggcagcgatccctttcctttaagagtctcccgtgaccactgtggcagaacatgccaactcaagggtcacgtgatcggtcattgccattgtagttctgcaggcgagggtaaggttcgagcagagcagcgaactgtcctgtctgccatcgtcacacggcttcagataacgcaggctgactaaatcactgccgtctctgccttgtcacatggccacctcttctgtgtctcttcttttgtatataataaggatgcttgtctggccttgagacccacccactttgagatctttcacagaggcctttcgtaaggttatactcactcatgatcgtgggccttttggggctggacttcaggtgggtagcctgggaagtgggaacagggcctagcgcaagtcctggtaggtagtcgacccaccctgggattctttccagtggagttttatctgcaggaaaatggaaactgcagctcctcttgccagagtgtgaagctgtggaaacaaaattaaaaaaataaataaataaaaactgaggtcagcttttctctccgctgatggggtctctgcagagtcctcgtgggatccagtgtgaacaggaagctagaggcactgagtcacgtctcctttatttttatggtgtttttattgttttagaaaagggagaaagaaagctaagagcttcctccttgatctgggtccttgccattaacagcttgcttttctgacactttccccactttgctaccattttcagacatgtgtctgctcctgattgatgcacgcacgcgcacacacatgtccccaggttcctgctcatgctgtagtggtttctgcagctccttctttctgctcactactctcctatagatgcgtaggttctgtgtcatgccgggcagcagcaccccagccttcagagggcgtgttgcacgcaccccacatctgctggctcttggtgggtgtctgtccaatctgctgtttccctgactgcttttcttgggtgcattttgctcctcaggcattgctgagcgaggtttgctgtccccatgatatggggtgtctcctgggaatggtagagcctcctaaagtggcttctgtggtagggtgggtattcctgtgcctgcttgtttgtgagcacgagtatacatgcttgggcatcggtcagtgtgtatgcatgtggatacctgcctccatgtgtgtacacgtgtgtgcatgcttgtagaccagtgtgtgcatgtacatgcaaatgtgcatgcctgtgagcacctgtttgcacatgtgcacatatgtatatgcatgcacatgtatggaaagctgcactctggactctggactcttccctacatttagcagactctgttcattaggaggctcgctaaactcattttctagaagtctgttcttggctcagagctaaaaatccacccttgctgttctctggcaatgctagcctatctggagtgatagaggatgcaggggcattcagcatgatgtcacagattgtgtcatctgtgtttctccaggagtcagctgttcggctgtctcgtccccagtcacactggctgtcacagccagatgctgtggatgttcccagataatttccagccatttcctctcccaggggactgtcctctctgctcatggggacttccctacatagtcacgttctgctccaaagggatccagagtcatggtggcctgggcaggctttaaggtacaggtagatggcctgcctaggtcatgtagggccaagaggacaagaacagggagttggcctgctcgggaagcctgtcccaggcgcaggcagagctccatgttcatacccataagtcaccaggccagcaaggcatggatgaaggttgctggctggctacttggtggggtcacccactggggctcttgtaggctgagcctcacactttgcctgaccgttcacttcactgggacagcacccagtgttacatttaggggacaataactgcctccggtaatgagtgactcctttgctgctgctttaagggaatccttttgtccttctccagactgggcttcgttttcctgaccagcggcgccagggctacacacaccgggggcattgagcagagagccactgactgagctcggctattctgtttccttttgctgagggcaaatgttgatgtaagttgcagtctttcctcctgttgtgagctgctgaagttatcctcttgctccctggcgtgctcttatctgacctttatactggatggttcatccaaccataaataatccctttgaaacacagagggcctggtgtgctggcatctgcagaagctcggagaggagctgccaggagagcaggctgagcacagggaggtgcagggagggtgccaggactgacggaggaggggttcttccgcctccttttccattgggcctgagctgggggaagagtaattagataataatgaatgagccagtgagtgggaggagctggtcttggggactggcagggaggactcagtgttatcagagtagagagggttggggctcttcaccagggctgtgaacaggtggctctcagcatcaggcttttgctcatagactacagtcagtctgtgttctgcatcctttccgagtcaggttcacagacaatgccacagaactctggggtctagaaggcctgtcctaacccataggcgccttagggtgcaggcctcagggttttctgtgtgatggtttgtaaatgctcggcccagggagtggctctattagaaggtgtggccttgttgaagtaagtgtgtcactgtgggtgtgggctttaagaccctcatcctagctgcctggaagccagtattgtgctagcagccttcagatgaagatgtagaactctcagcatctcctgcatcgtgcctgcctggttgctgctatgctcccgccttgatgataatgaactgaacctctgaacctgtaagtcagccccaattaaatgctgtccttttaagaattgccttggttatggtgtctgttcacagcagtaaaccctagacaccctgtttcctggtctctggggcttcctgtcaaaccttaacttagctgtttcttaggaagccaggtctttctgggtagcttggggttagctgaggtttgtggctaaactgtcttctgcctgaaggttctgagaagctagcaagatcactggggatcttgactcaataggtttcctcagtgacagtgggggtgttagtgtgacacaaccattccccgttcatagtgtcctaccctcaggtcctaaagcaagagccgatgttcttggaattactgactggtacttacaaaggcgggataccacctctgacttgaaaccagaatcgccagctttaactctggcttggcttctcactgaaggaagatttacccacaagtatgtggcagttggagacaatcccatctcgaccatttcctgttcttcaagggtcaggagaggcctgagggccatggcttgatcacacacatgcctgaacctttgccctgaatttaggatgctctgggaattgtccacttttgaaggtacaaaagtgtagccatttgagaaggccacacatggttcctgaagctccttggtttccacggacagcttcagcgcatcggatcttgaagaaagaagagcagcttgaaatggggctcatttgccagactcttgcattgctgtatgcagagaaagatggctggcgaccaggagtggggaggagcagatctgtttatgcttttgtgtcctgtgtcatcttgcagatgctcttacttggatgaaaatgcgagtgatttcttaacccaccctcagaactgcagtagaagcggagattcctcagggctgaccctgcccgagcactgatgctgcgggctgagtttatcctattgacaccaggtgtctagaagctgtggtttcatctggacatccttggagtaaggtttcttggaaacgagtgaggcacagtgtggcagggacgaggggatagacacttgtgtacagaacctggtgcccatgtgacaccaatgtggctggagccattggtccctgtggaagcctgagtattctatggatgtggatgtgaagccccattttatttgtttgttttgtttatttatttttgcctcttttctgggtggtagccaggaaggacctgagtaagaggatgtggctctgtgtgtgtgtgtgtgtattgtctatgcatgtatatatgtgttttgtgtgtgtgttatatgtgtatatgcatgtgtatatgtggttttatgtatgtggatgttatatgtggatatagaggcctgaggttgcttcaagaatcattctagaattctcttccaccttccttgttgaagcagggcgtttcaggcaaactcagagtgtctgggactcttcacctgtgtcttctgaagacacagatttacaagaattagaattacaagtgggctgcaatgcccatccagcatttacatgaactctggggatcggatctccagacctcatgcatgtgcaacaaaccttaagcccccttgttggctcttaggtctgtcgtttgtaactgaaagctgggcctgtagtctctgcatggtcatggtcagcaacagctcaaggtacagtgccgttgtctccacttacagcagctggtatggctgaagattcactgatgtattgagctgtatacccagcagctgtttgtttgtagtggatatgcacctacaatagattttaagtgtgaatcgggtacagtaagagtttaacaacaagcctgtctgtgctgcacacctgcagtactaatgactaggatgtgtgagatgggaggatggatggatgggaggatggatgggaggatggatgggaggatggatggaggatggatgggaggatggatggaggatggatggatgggaggatgagatgggaagatgaaaagggaagatggatgggaggatgaagtgggaggatagatggaggatggatgggaggattgcaatttcagtgcctgcctaggctacttaggatgactctctcactgaaaagggctctaatacatgtgtgttaacacttgttcacaaatctccccccacacacattctctctgtcttgaaaaatataactgtacagtagagctgagcagtcttagcatatcttatttcttcctttaggttgaaaatacacaccctttctcttaaaagcagcacttcccggtgcttctctttggagacccaaattcctacagcccactctccaatgctgtagagtcattgctaaatagaattggggttactggaactcagggcttgtgatgctcaggcagtcaggctgataactgagacagtgttgagtggctaatgtatacatggtggatacagtgggcaagaggaagcatagcccattagggtggggcaaggtgatgaaggtgtgtgtgtgtgtgtgtgtgtgtgtgtgtgtgtgtatgttctcacgtgcacactacaaagaacatcgagcagctacaaacttagaacaaaccctgtggatatttttggactgtgattgatggtaggtaagtgaaactgtaagattgagtgtcgggtgacagggctattgtgtggccaagaatgtgagctgcacacccaggacctgggatgtgctgtactgcactctggttgcctttctctctgggagatgaaaggcgtgattccttgaaattccaaaggagtaaatggtctgtcctgaggtctccattttcccagtatttacaggattcaggctctctgccttgtgtttggacctcagtcatgtatggagcaaacataggtcctgagcgttgtgtaaacactctgctctgcagcatgtgatatctgcagagggtcatcaggaactgctccagaattttcaactattctggacccctttaccacttcttctttattattactggacagtttcatagatgtctgtgaaactttttagttgtttctacactttatttcttaatctgtatatatttttataattttttcttttattatagtgtgcttgtgtatatgtatgctcatatatgtgcagatgtgtgtgcgtgagagagagagtgtgtgtgcacatatggaggaatgatttttcttttctcttctttccttttcttttctttttttggtatacatattgaaacccagtctctcacagaacctagagcttgccattttggatacataggcatgtggccctgaatgaatccttgatacctaagaaccagatgtggcaacctgtgatcctagctctggttgtggagatgggaagatatgaggggtgtctcactggctaatatgtccagccagttagtaagagacccatctaaaaacaaaaatgaatgggtaaatatggacgccagcaagatggcttggtgggtaaaaacgtgggctgtgcaagtccgatgggctgagttcacttctgagaaccccacacatctatggcaagacggacagtagagacaggaggattggtgactggcggcttggaatatgtagtgggagagaaacaaccagagaggctctgccccaaaaggtgaagggagagacctccacatgggagccatggtagatacatgaccccacccccccaataataaataatattgtatagagccatgatgctgacctatattctcacgcatgtacctgtgagcatgagtatacacatatacaggtgcacatactacacacatgcacacacacacacacacacacacacgcacacacacattttttagttagagaagatccatttgtgctttaaggtcttatcacagtttatccatataagtttatttctaagggtgccaaagtgtattgttctggtgacattcatatcccccagaataaatgttgaagatctgtccgtcaaatacacggagtcattttattcttttccatcgtctccctttgtttctgagattaatagaccagaagtgattgttttgctgccagggtaacatcagcctcgttgtttcccctcccattgttgagaacagattataaacaattgtcattagttacttctctctcattgtatgggataggctttttcaatcagattgtcagagacctttctgatgtcattttcactatgtcttcaatttccttagtgtttatagtatccatggggctatttgtcatcttgggtgagtttgaattgtcttcagttcctaaagaattgagtgttttcttccaaaccaggcttttcatgtttatgattgtttacaggctttttctgtcagagtctgtggggtctgtggtggtgactcctctctttttgtggatggtgggagttggacatttgttcacatactgtgggttttaggactagtgcagttaggtatcctttgcctcacacccagggggccgtctccaccatcttctcctctccagggaatagccagcggggtgtgtcagggtgaacagcaaggctctgcagccctggtggcaggtggtgccaggactagccaattaacacacaagcaccccagtgacctgcgcatccgcagtgtctccagaagggccgcttgctacctgggaacagtcccaggggatcattgagttggcttcagtccacagggagagggaacttggaggccatggaacacggatgagctcgtccctgctctgtgagggctctgcgggtgactgttccaaggaacagattcattgctgttccatcaaagccgctcactggcttgcttggaaagcccagacaagcctgccaaatggaacgaggcaggagaggaggaaggaacatcacagggccgcggaaagaaggcttattctccagaatctggctgggagttagaagctggaccaagatggaaaaaaacaaaataacaaaaaaaatcaaagccgcctacagaaatagtgcttgtctttttaatgacattccaaacaaggatgttaaaaacagctagccaagaaggctgacagagtggctcagagggtagagtgcttgcctagcaggcacaaggagtagggtttagtcccccagtgctgtgtgaaaggggtgtggtggctcacacctgcaatcccaggattctggaggaggggaagacacaaggaccagggagttgacaataacctccaaccatagagtgagtgtgagtgtgagcgcagtctgtcttaggacacaagccagctgtgcctacgcaggccagaacgcctgcatttgcctctgccatccctgcacacgggtagtgcatctgacggttctgtgcacggaagaagatccttcacgttccttgaaataagtcaaccagcctatatctttgaagttgaacacttagcttaggggctggagagatggctcagcagttaagaatacggtggctgttctttcagaggacccagattctagtcccaccacccacctggtggctcacaaccctctaattccattcccagggcatccagtgccctcttctggcctcgttaggtaggcatgcacgtggtatacagacacacactgccagaacacccacatagataaaataataaaataattttttaaaatatgtagcttaaaccttaaatcttgttgtaaattagattcttagccacaaaagtttatacatatatatgtacatataccctatgtatatatgtatatataccctatgtaaatataaatatgtgtgtgtgtgcgtgcgcacgtgcgagtgcgtgtaaccattgcaaagatacctaagtatggctttctaagcagcagccctagatgtactatgcctcatctctggttaataataaaacatgagtttgactttgttaaaaacacatggctcaccctgaaattcttttcctgcagtgttagtccaggaggtcctgagggtgagactccttgggctgcgttggcagctctggtggtgccaccacagcctctctgtcctttgcttttgctaggtggggttgaagatgattgactgtgtccttctgtagggcacattgtcattgtccccgtttgccctgtttggatgatggaagatgtagatttagtaattcctcaggcaagtaattttgcttcatttgattaaaaaaaaaaactgtgtcatgctgggctttcaaacataatgacctttaaggaatagaaagaaggttggttctggagaaatggctccgtgattaagtgcactggctgctcttgtagaggctggagttcggttcccaatacccaaacgacagnnnnnnnnnnnnnnnnnnnnccaaacgacagcctgtgactctggtgccagtggatctgatgctgcacatggcttgcatatatacatataaagcatctttgaaagagcggggaaggttttcaaaatgcagaggatttggaaagtcccatcacagaggggagcaggggctgcggggaggggaccccaggctaccgtcaagcaccaacttgaagtaacaatgagttgtggaacaagcaggcagaacacagtgattgccctggcctgtgctatccccaaaatggcctctgtgcctgctgtcccttgctgttgagtcttgggctgctgtcagccttctgcagctgtctgctgccactttgtattagtgtggcttttgccagtgtgtgacatggtgtcagcagtctgctcaggtgaggacatgagctacagctctgtcccaggtgcttgacagctcatggtggctggaaggcaatgttctagggcctaacctccactgtggtcatatgcagacaagggtttctaagaaccatgtctttcctcctctcataaagtaattcattgtttttgtttgcggagacagagtcaaactggcctcagaatataattaggtatattgtatccagacattttgtgttaaaataacaatgaccaagacactgaagaggtgactgagtttgtggctaaagttcttgcaatctgggtttgggaccccagatgtaaactcccaatgagatggtgacttgcctatagttccactcatggaaggtggagatgtgggatccctaaaagcaaggtggttagggagactgctgtattgatgcgttctgggcttgatctagagaccttgcctcagtgagagtgattgaggatgagactagacattactttgggcttccacgtgaacattcacttgcattttgtgtgtcttgagacagaaactgaagggctgaaaaaggacatcaggtgagttgcttgggtgtgtgcagttgtccatctgtgtctaaggggataggatgggttctagaaccctcaccacagatgccaggattcgtagatgcaaggtttttggttcgttcgttctttctttctttctttctttctttctttctttctttctttctttctttctttctttctttctttctttctttctttctttctttctttcttttttccataagggtatggtgcttgttcacagcggtgagcatccttgtatacaccagccacctctaggtgcctcacagttccaagatgatatatgtgccatgtcagtgcatataaggaatagggacaatgacaaagggcaaagactgcatatgcacagagctccgtcttgtgaatgtacatgggacccatgtgtgcagaggtccacatgagtctgggttgtgggcatggagggaccaggagccccagggatgctgaatcatctgtaactatcagatgctgtgctttgtctttctggactctgagggatccccctgaatcatcttggttctggagtgttgggcagttagagcagggtggtactgggggcaacacgtgcttagatccacacttggtaccaggaagaggcagagatggtgctgttccagaagagtgccctcgggggctctgcttaaggaaactccagccccggcaaccaggagaacctcagctcaccttcatctggaggctgagagctgggaagttaatatcagcttccctccagggggctggtgacattttagtttctgctctggtggcttgtgaaagagtaacgaaggcccttctagggtctgccccctggagctttggacttaaaaacctctggttatatagtaacgggagcgctaggaagggagtggcatcctcccaagaaggttctgcagccgagtctgcttcacatttgggctcatgctcagctctcattctctctgtatttacaggcattgcatgctgggtactgattgcagaggaaggcagtggcaaagggcttaaggaagtgcacgctgaacagaggtgctctcgagcaggggcgggtgctaccaggttgattgacaccttactaccacacacacacacacacacacacacacacacacacacacactgtgttctaagcagtggagtactagtgaggtactgggtgggctcctgggtacttgcacatctgcgagggcaactgtgcacgtgctcatgtgatctttgagtactggtgtgtctgagcacgtgcacacatctagcagatgctgttgtaggtgtagtgtcaggccaacacccagggtcttcctgctgccttgtggtagctccgggaaatgaaggccccaggcagttccagttcatgtccctgccccaggcttgcagaggtgttttgtcagccctgaagagaacccacatcgacagaaatgaaaatgaactcacattgcggtgagatgaactcaggtgattttcctagtttgtttgtttgtttgaagtagaacgtgtgtgtgtgtgtgtgtgtgtgtgtgtgtgtgtgtgtgtgtgtatcatgtgcatgtttgtgtgcaggcacacatgagtgcatttgcatacatggaggccacatcatagccttgacttattcttcagatgcctcctagttgatttttgtaaagatctcccgctggcccggaacatgctgattcagctgtgagtcccccaggagtctcccggctttccagtgctgggattaaaagcacacatcacgtttccagctttttactgggttctgggggcttaggctcaggtccacatgtttgcaaggccttatcaactgagccatctcctcagcccctgagtcaggaaatggttttgaacttcctgttctctttagatgtctggcccattggtgcatgcccctgacacagtgccacgggctggcgagtcccacgtttatatgggtgcactcttaaaagtcaggctcagaccgagagatcattgactctgctgagattctcagatcttgggttcttgctgtcatgggcctggttagctcctcactcttctttctcctgccccactccaaccccagaaattcaggacaactcccaactctccttccattcatggtttccccccaagtcatcccgtttcctaacctcactattgtgtcccttcccttcttctagtctcagactttggaataagtaacctttaagttggtgttcgatcaaggggctccgggctgtgtgccaatccgtaagtcacataccacggacatcaacattgactgtcctctgtggatgtacaaatggttccagggcagtggaaaggtaacccttgccctcccatgggaagagccgacctgtgtccataggaaatccatcccaatgtcccttgacttcctatagctttttgttatggagaagaaattcacataacataataggatgctgtacagggacattctggtactgtgttctttggcttgggaagtattgcagccccccagaacttcccgtcctcaccaaatcagtttaatgagttgttaggagctgttactacgcacagccttctggagtttgtccagttattagcttgtcattcagaaaatcctttggctacagaaccctagtgtcttatgatacagtttccaccaacgtggtactcttctaatggtggataaaacttattagagatttattctggcagtctgctatggtgatgggctattttatatgcttggatcattcttgcttctgcttagttgtatgatcatgtcgctatataatgcctttgagggctctagtatttttttgatttgtacaagttcaagtaaaaaacaaggctctgagttttcagcttggtggcagagggcttgcttagtgtgcttgagaggctgggcgtcatcttcccccaacaaaactatatatttaaaaaatgggggtttaataagaagacttggtcagaggatgtaaaggccagtccaccctttggccatgaggatctggtatccccagggttacaccggtgggagggtgagagtcctgaagaacatagattgcagagaagggctaggtgtggcataggaatgaacatgtcccaggagtgtcccaagagtggcttgggaactatgggatctaagaatggagggaagccttaggtttggtgcccagggtctgtttgaatgacagcttgcttgggggtagtaagccagacctggagacctctgtgcttggccttgtctgggtagattggcatcatgaatcctggtgttgggaaggggtttctttgcagtggcctttctggaacccagtatgggttctccaggagctcaggacttatgtgaagccagtgtggtcaccattgttaccctcagtccttcagagtgggggtatagtgttaaaggcttgctggcctggactgtccattcacccagatgggcctgacacactttgccaggtcttcctactgggggaaccccatctctgcttccagttgtgtcctctgagctggccagtaaccaagagaatcctgctagagagagagagagagagaaagagagagagagagagagagagagagagagagagagagagagaacgaannnnnnnnnnnnnnnnnnnnnnnnnnnnnnnnnnnnnnnnnnnnnnnnnnnnnnnnnnnnnnnnnnnnnnnnnnnnnnnnnnnnnnnnnnnnnnnnnnnnnnnnnnnnnnnnnnnnnnnnnnnnnnnnnnnnnnnnnnnnnnnnnnnnnnnnnnnnnnnnnnnnnnnnnnnnnnnnnnnnnnnnnnnnnnnnnnnnnnnnnnnnnnnnnnnnnnnnnnnnnnnnnnnnnnnnnnnnnnnnnnnnnnnnnnnnnnnnnnnnnnnnnnnnnnnnnnnnnnnnnnnnnnnnnnnnnnnnnnnnnnnnnnnnnnnnnnnnnnnnnnnnnnnnnnnnnnnnnnnnnnnnnnnnnnnnnnnnnnnnnnnnnnnnnnnnnnnnnnnnnnnnnnnnnnnnnnnnnnnnnnnnnnnnnnnnnnnnnnnnnnnnnnnnnnnnnnnnnnnnnnnnnnnnnnnnnnnnnnnnnnnnnnnnnnnnnnnnnnnnnnnnnnnnnnnnnnnnnnnnnnnnnnnnnnnnnnnnnnnnnnnnnnnnnnnnnnnnnnnnnnnnnnnnnnnnnnnnnnnnnnnnnnnnnnnnnnnnnnnnnnnnnnnnnnnnnnnnnnnnnnnnnnnnnnnnnnnnnnnnnnnnnnnnnnnnnnnnnnnnnnnnatacatacacacacacatatatatgtgcatgtacaggttgattgctcccttttagtggactgtggcatgtatctgctggaggatgcaaggtaaaaatgtcactagcagagaggtgaccaagttgtcttctgactcccagactgaagccgtggtgtgagagcctgtggctgtttccctgactgtctcctgacactcattcacgctctccagtcaggcattcctgaagctggagcttcagaaagtcccagtctggccatcaatgtccagccctaattctctcttgggctgctcgacgtccacacagggtgactgccttcttccttacagctgcctagaatactgacatttggataaactgtcacttgctctggtcacctgctggtcctggaggctgttttcctgactttggtgtgatgcagagaatgtcctttgacacatcttttgtgtctgagtgggaagcggtcttggtcattttctgttgtgttaactgggtaatttacgaagaagagtgctttatccggcttacagtttgaagttaggatatccagaggtggggtgctagcatccattgggcatcttttgatgtttgggtatcatggcaagggcatcacacagtgagacagatcgagcattcgaggcatgggtttcttcctcttctttaaagctactaatgttatcatggaggccaaatcctcatgacctcatctaattaccttgcaaaagccccacctccaaataccggcagtgcaggaatacagagattcagtgtcaccctcttaatactggaacagtagggctgccaaatttcaacacagggatctgggaggtactctttcagtagcaggatatatggcaggaacttcccgactgtgttgggaggtctctgggccatccccatccctggccctggtgatccctgtccacctagaagtggtaatgacaccttgtttattcctcatgtagttaatgacaccaaactgtcaacatctctgatttgccctctacagttttatgctctggttaggggctgtgcaggttccaggagaccttatgaaaggtggccctggcattttctgcctgctgtttctgtgtcttttgtgtattgcatagtaaaacctttcctgctttgattttttttctttttttttaagcccacaagttcgagtagtcttggtttcatccctccctatcctctgcttaaaatggttgactgtgtgctaacactggcctttcttaacgtgtggttctagttcagggcatgcattggaaatgtgctaaaatgtcattcttttttaaagcttttttaaatgtttccttgtttgtgcatcacaacatgcatgtggaagtcagaggacagcttgtgagagtcagttttctcttcccatttgtgggtcccaggaatcaaactcagaatgtcatggggggggggggcgggtggggagggagnnnnnnnnnnnnnnnnnnnnnnnnnnnnnnnnnnnnnnnnnnnnnnnnnnnnnnnnnnnnnnnnnnnnnnnnnnnnnnnnttactcactgagtcatctccttgacctaaaatgccattttgtatttatctatttacttgcttatttatttaatgtttatgggtacactgtcactgtctttagacacaccagaagagggcatcggatgccattacagatggttgtgagccaccatgtggatgctgggaattgaccttaggacctctggaagagtagtcagtgctcttaacctctgagccatttctccagcctcaaaatgttatctttcacagcctgccccactccacacacgctgattctcctagtttgcgctggggacactctgctgctctgcttcctggctagctctgagaaaataagtcagggcggggcagacactgccagcaccttcctgttcttggtggcagttgccctgtgtggttcacctggcagatgtgctgatgtgccgcacatgacagcagactgctctcttgggcagtactgttcctgagtctcatgcgcatatgttagtgtgtgcgtgtctgattcacttgggttctgctcatcccccctttccaattcttgtttcagaccctggtaacaccacaggaacacagccaagtcctgaataccgacatgtctgacagtgctgatccctaggtgagtaaccaaatccactgccaaggaagattccttgggaggtggccccatgagtcagcagtccgtctggtctatagctggccccgtggtgcgattagagaacctagaaaagcctgtctgggtgagggatgggggcattgaaggttccgcgtggatggagggagaatggctgccagcaagatgcttctgggtaaagcatattgagatggtgaattgctcacttttctgttgaattcccaacaacagcaacttaaggaaggagggaagggttcattctggctcagtttaggacaaagcctgcaggggcaggtggacagcaggagcttgagacctcggatctggccacatctgcagtgcagaagccgagggaaacaatgttgcacttcagctggccttctctttattcagccgggaaccccaccccacaggatagaacaacccatactcagggctggtctttcagcctcagttgaacctctctggaaacatcctcacagacatacccaccagtgcgtgcttccgtaggactctaaatcccatctgttgacaagggaaatttaccatcaaaacacctgagtcagcaccagcttccgggcaagacaggagggagctggggttgagtcctggcatgagttatctacccttatactgctccacctaaaaaaatcccctgggatttcaggagcatgcactgcgtctctgaaggtagcctgtctccctcccgagagagcttccttgcttctctccagtgctcccagctactgtgtgaccatggagtatttaagtctgtggagatgacatgccagcccttcatggacactcactacactagtgtgactggactggtgaacaggctgttgtatatgggccctgttgcaagggcagtagctatgccatcccgtctcagtagctcccggagagtattggtactctttttgacatgtgtgaggaggaaactccatatggtgaaggcagcatccccagccattttctcaggagtgtctccagctttgtctgtgacctcctccctaccaattcgagtctcctgtcactgcttgccccatcccaggtcccccaagtgcctgccacttcctggctgaccaaatcatggatgcggagcagccagtcaaaccccacatcttcctccacagcaggggcctagaggctctgactgaaggtttataggaacacacctgcattcagtgggctttcttaacgtggcttttgtctcccgccatatctcaagtgtctgagtcttgtctggaagccccattcgttgggttggccggctgttagcacagcacttgggcttgtggctcggaggcttgtccaagcgtctgctttcacatcatggatatagtcgagcccttatctgctgttccactgtgtgcatgtttgttccctgaaatcaacaaggagaaagaacacagcacagtgaagcatttgaaaacaggacagagggcttacactagcacagcttagtcctatcgctaactgttctcgaaatctcagtgtgtctaatttttagaaaggaatttgccctgggtttctgtgtgcttgaaaaagcatggagcaccctccacgctgtctgtcaccccacagaggtcttggagggcagctccccggaggataaggggggctgccatagtttgcatataaaagactgcctagaaaggagatacttaggaatattaagctgtattttgtagggtttgcatcgaggtggaagctaaaataaattttcaggatctttcccagcgtgaagtggcccatgcgagcagctttgccttcagtgggtcctcagagtggggacaaagcaggcattgtccttactgttgcccctgggggccccgtctctatgacgccatggtagaaatctagccaagaatccaagagtggcctctgggagaagctggtgtgtccaggcagggaaggctgcagccagaaggttctgggaggcctggctaacaagctttggggggtgcttgggtgtccctaggatccctcagtattctgttaggaattctgagcatacgacagggcagatatcaggattagggacaggccttgcttggtggcaggttacaaagtaaaccccacctgcagttctgtccttagagccatgctcttgcctgtgtatgtggtaaggggacacacagagtatggaggtaaagaggtttgagtcttcctgcacttttgaagctgcccaagctttacaattctgtcttttctgtgctccggctagttcccccacagttctgtagctttcttgtgttttgtttgttttattttgtttttaagacagggtctcactatgtagccctgtcggtcctagaactcactgtgtagaccaggctggccttgaactcacagacccgcctgcctctgcctcttgagtgctgggattaaagatgtgagccactatgcttggcttcatcttttcttgttttgtttttaagatgtgtttaattatgagtttgtatctgtatgtgtgtatgctacatgtgcgcaagtgcccaaggaggtcagaagaaggtattggatcctctggacctggatttacaggtggctgtgggcagcctgctgtgggtgctgggaactggagtccagttctctacaagagcaagaagtattcctaatctctgagccagctgtctataacctcagcgccagccattaggccttaccaagcccattgtgtgtatgctgcagcactgcccaggtgtgcccagccctggagtaggcttagctgagtgtacctgtcccctaagtgtgcccacccctgagtgtacctggtactcaagcgtgctaccctcaagtgtgctcaactgcctcaggactgacaagttttatataggggggataccttatttttagtcagtgtctaaaatataagctttgagctgggctactgtagatttaattaaatgacagtaaaacgggagataagtacttccatatgtttcatgggagggtctctctggtcctttgaggctctgacctggaataatgcccaggcccaaggaatgatgcctcgagcatcagggatccagtacatgcagagccaaaagctccgagacccattaatattcagaactctcacctctgtaacatcagccagacactaggaccacagggtagatcaccagcaggcattgtaggagaagtgtccaagatggcgggtcctctggtgtctcagaagtgacagaagatgatgcagtttagtgctgtccagcctcttcaagcacagaggggccagccctgacttaggccttggccacagcaaagtatccatttatagtgactggaagcctccatgccctcagcacacttggaggcagacattgatattagcagccccatatgggacatagtgctctcctgggctttgtacctataccactcagtttcacaaatgagtactatgcctggcccaggtgcaggagtgtgtctgtttaaagccaacgcctgctttgaagattcagcacccagaaggctttgcacaatgctccgttctgaagtgtattgagtacatgttagaagggtgtattgggcatatttgtgtactggattaaatgagatagatcatatgaagtacttactctgctaccctggccatccatgccatccgtggtgtgtgtcatctgctgtgtgtgtcgagtagcatggttctggagtgctgtggctgcctggggttggagtttgcgcccatccctctggggtggggcaagtggataagtactattattactgtttgtaaggacagctcctaagcagctttctgtagggaactgtgaggatcaccatggagaccatttttctcttgaggcaccagccctgccctgcctcagtgagacctcgattaccactgaaggctcagcattgtgcaggcttactttgtctttgttttcttttttgtttttgtttttgtttttttattttttgtttgttttgtttttgtttttttgagacagggtttctctgtatagccctggctgtcctggatctcactttgtagaccaggctggcctagagctcagaaatccacctgcctctgcctcccaagtgctgggattaaaggcatgcgccaccacgcccggcttgtctttgttttctattggggtaaagatatagttagtgtacataggctggtgagatggctcaatggttaagaataccagccgctcttcctgaggtcctgggttcaagtcccagcaaccacatggtggctcacaactatctgtaatgggatccaatgctctctctggcaagtaggtggcatgtaggttgcaagtaggcatgcatgcagacagagcatgcctacattaaaaaaatatacagtgtacttgtttgtagctaatcttccacatcatggttgtgtcctgaatgcagtggtggcttgcttggcctgcatgtcagtgttcatgtgagcctatgcctttgtgggaggagagccacctacctcataaatacctgtcccctacccaataccacgtgacttgctttgagtggcctgagtggaggggccgaggcctgtgcagctgggacccagcacagctctaggaaaagaccttaggcactcccacatctggccaggctattaatatcccacaaagggctcctttctccctgtggacagcctgcgtgtggtgatgctgtcatgcacgtgagcggagcctatgaagcgagccttgcggtgagtggctttctagaggcaccgttgagttcctagctaccagcctgggcctcacagatttctgccagccagaaatggatgtggatgctggctcccagaggacaggtggaactgtgggcccgaaggtggtctgctgtacagaggctggcccttcccagctattttctattcacacaactgtagaagagttctctgtagcaagaggacttaagcaagcagcaaacattaaactgctgggggaagacagaccccaggtgggatcgctaaggtcaagtgggaagagacggtatatgggtgcatggagagatctgacatcatatttaaaaggacgggccgttaggacacaggctatgtgtctcctctcttgtggtcttcctatgcagagctggtcccacaggaataccccctagctgagcccttctgagtatcctctgagctggacataagggttgggacttggatgagaagcccaccccaaataaactgtgtctgctgtcttcctcctcccgatgttgcctcatgtttagaagttgcggccatcatgatcctagatggtgcgtgttttcctgaaccagggggactgctcgtttgtgcagataatgcagacccctgagaacactatagactgatatcttctcttcctctgggtggtgcaggcaacatatgggaggcacaccagactccgagacccacactcagccattgtgtgtctttgctcttatggctttctgcagatggattgtataactctcctgaccctagtgtgtgaatagctcttgtgagtgtgagcagattaaaggtcttttaatggggagctcatttgggcttatctgggaggacctgaatgcagcaacaggcacacttttaggagaaggagagagagacagagagagagacacacacacacatagagaaagagacagagagaccgggggggggtggggggtggagatcttcaacactcatcccctgctgnnnnnnnnnnnnnnnnnnnnnnnnnnnnnnnnnnnnnnnnnnnnnnnnnnnnnnnnnnnnnnnnnnnnnnnnnnnnnnnnnnnnnnnnnnnnnnnncggcgttcggtgagacattgctctgaatgactggaaggtattctgacttgtgtgtgtgtgtgtgtgtgtgtgtgtgttgtccgcaccaggacatggttttgccatacagtcttgtggaggtctaactgaagactcagagtaggtcagagcctttgccttgcatcttaatgaaacagggtctcatttacttgtttgtttcctttgtgtgtgccacactctaacctctgatcttctgaggctcctcctatatcctcctcccatctgattggaggagaattggggttacagatagatactactatatttggctttatttgggttctggggactcaaacccaggtcttcttgctggcgtagtgagcactttatccactgagccatctccccagccctcgatggggctctgatgagatctaaagactaagacagaaggccttcccttggtggtccttagtaggaagaaatgcctgcaggttatctggaatctaagaggtcttcagttgcagattatagatcaaaggcttcttagtctcaggggccaggtcagttctgctcttcaaagaacctggggtgccaagagccccataagctaggaccctttgtagccaccgcacccagggagagcctggatataattttttggggtctgtggaggcagcagggtccttgactttggcccagtgacattgacataaggcttccatcctctagagatatgggagtcagttcctgttgttttaagcctctgggctttagtaattggtgagaacagctacagggaaacaggaagtcaggataaacagcgctgccacagataccctcagctgcagcagagctgtctgtcattcagaggccttgacctcagggtggggcactgctgggtcacagggtgtgtggctcttggctttggtagaacttgctggcctagttttggaaaggatcttggtaggggatcccgctctcagttccctccctctgcagtggcaagtgtctgctggagatcgatgctgtggtcacattgcctgtccctgagccctggtgagcagttccagcctggctgtactctttactaccacttctgttgggttgtctgctcctcttgctcatcagcaggggctgagtgttccagatctttctgctttaaaacactgattcccaattcttcattttttctacgtgtggaggtggggagcggggatacatgccccaaggcacatttgtggagctcagaggacagcttaagagagtccgttctctcctatatgtggactcattctggagacggaactcgctctgccgccttgcctggctaagcctctagctgcttcccaactctgtcttttgctggctgcttttaatagagtctcatttgtcagccagatgaaacgtgtacgtacgtgcttgggtctttttctttgctcttaagctttgtggtggcggtgttaagacacagtggctgtgctggagttttattctgtgagtctgaattgccttgcatgggttaagggaaggctttgggggtgagttagagcacatatgtgggggtgggggtaacaaccaaaaattattaacagagcttggtagacacctttacccacaaaaccatctctggccctaaaaggtgttttagaaggaggatggagtccagtcttgggtccttgcagtgtgttggcaccaggcgacaaccattcatgtttggttttgatccatgacttgaacgtcagctcagcggcctctcacgtgttcttcataagaggacattccactgctccccggtggcctggtggccttttcccatcctgagtcactttggtgacagttgtgtggagtgtgctgacagcaatgaaggagtccccgctctgtgccctccctgcacagtgaggagaggagatccctctaatgtgtgtgggatgacacatgttccctctgtagaggatacacagtagctgtgctgaaggggctctgcgaggaagaccaggaagagagggagagcacacagagaaagtaactctgtgttaccagtggattctagaagcccataaaactaaaactgagggactggagagatggctcagcggttaagagcactaactgctcttccagaggtcctgagtttaaatcccagcaaccacatggtggctcacaaccatctgtaatgagatctgatgccctcttctggtgtgtctgaagctcagttagaggaatgcttacctagcatgttggaagaagccctgggcttgatctccagcactgcataacactaggcatgatgggacacacctgtaatctctggaggctcgggagttcagagtcagttcttagctacacgctggtttgaggccgggctgggctcagtgagatcctgtttcaaaaacaaacagaaacaacaaaaagcccaactatgaaattagtgaagtcagagtgtgagcctgcgggcaccacagttgttctgtgcccatgtccatgtgttaggatgtgtgtcgccatgtcccaggtttgtgtgcctgaccttgaatttccggcctgggtcttcctgagtattgcccctagatggtgcctgctgctctggtgtgctgtcccccatggcttctgaaaactctctgtgtggctgagcttgctaggccccgccactgctgggagcaggatgaggtcaggcctgtgtttcccagtatgtgacccggccacacccaagctgtgggtggaggtatggagtgttgcaggtgcctgaccccacacaggattaacaccctgccttccccccacccccatctgcaagttaggtgtgggatgaggtcggccacagtgccactgggccgggtctatctaaccatttgctggtccccggcacgccggtccttctcaggcagcagctgctggcccggctgcttcatggtggcagtgatattgctagaccctggctctccctggttgcagggatgaacaccatcttcccgacgcccagcattctgcaggaacagcagctgtggcattgctttgaggtcagtgagaaagatggatgacacacgtctaaggagcaggtagactgagggtcagggcttaggggaagatggatgtaggaatgagccctggatttggggggtggggggaggcagatgaacagagtgtctggatgtgccagcaagactctaagcgtctagtgggtgtcagggcatttccttcagctcctccacagcctgggacacagactcccatctctttccagggcttctcattttgtggggtttgccctggggcaggaggtgggggttcacgctccagctgttacctggcaagtctgaccaggaagtggtggggagtttcccagcaggctgcaggtgggccttctagactgtgagtcttggtctggggtaagcagcttcctgggggtaggggaagtgactgggcaggtgatgtgtgggcctgcctgcctgcctgcctgcctgcctgcctgctcttctgattctgggtcttgggtttttgtgggcttaggccttttcctgcatgctggggtctattgaacggctgtctcttcaagcttcccctgagcagcaggtggggagttggcctccgctatactctttatttctttaatgactttctgatcccctcctgctgagcatctgagctctgtgatgctgttgctgtctcctcttggtttccacattctttttgtgctcctgtgatataagggaccagctccacaccatgcctgcagaggtgcttgagttgagtcaggcaggaaaaccatcaaggcgaggctaaggtgctgcaccccttcccttgctaggccttcatggttgtccaagcccctcctattgctctacctactggccttgccacaggcagttggacaacagagtctcttgggtctgagagtgtggcctgagccctggaaagagaggacactgggtattagggttgggaggggacacacttacagcctccctcacagacttgctgggtgttgatccacacaccatgctgtgtgggatgctggtgtgctaaagacataatggcactcagagaagctttttgaagtggctgggggtgggggggctgagaggggctatcagtcctgttttaggcgtccctgtgccgctgctgtgactggtctcatgatcactgcagagaagacgggacacacggcccttcctccagtcgcctgcctgtctgtcatcgacagtgaccgctccctgtccttttcatctgagactgacatttaatagatcagaagcaaagcgatccagctgctgttgggagcaggaatgaggggcaggcagctgagcagcccagcccccagtcctaaaaagaagccagtattgtccagtgctctgctggtgcaggctgggagtgggggttggagccctgaggaggagctgccaggcagggggatgggtcctctgccctctctttcctgttcttgggaacatccaacatgtcacttggatatgacctgccatacacctcagcctaggcctggcttttacagtcatccgtcatgtctagaggtcaggccctgcagagccgtcaccaatcaccagtgttgtctgctgtgcagaattgcagcgggcccgctggcatgaaggagaacactccctactgagtcctgcatgtgtggcgggagaggggcctgtccgccgatacgctgatggggtttagggcatttctttcagcatggtggcatgtggggtggttggaccagtgccttacaggcgttgactgggagctgaggaagcagtttgccgtgggaggtggctgctgttcttagaaggctgtactgttgtgagtggcgaaagcaggctgctgatcggggagacaacttttggaagcttgcacacagcaagcaaatctccacactgctttgtcactgggggaaaacagtatcagaatagagaactcccagagtcattgtgggctggctgacccctgttggctcaggtcttcaactcaggattgacccaagccagctcaacctccagcatccaaataggactgactatctcttgtttcacccaggcacacatcttaccccccaccccaggcgtgtttccgtgtctcaccccctgcttgattccacatgggtaactctggtcccctgctggcatttggtgaactgcccaagcgcagcaggtacccatatgtgcaggtgggtgtgagcaggttctgcacatgatactggggagctggcatggaaaactcctttttttcagatcatttccccacccccacccccacaccccacaccccacatctcccactccatccccgacagcctggtggctttacaaggagaaggccagactgagagagttgaggtgaagagaaacaaacagatgtgagtatttatgcatataagcgggtgtgcgtgcatgccctgtcatgtatgtagaggccagagtatatatagccttatgtcgggtctcaacctttcacgggagacagatcaggcagccaactgtgctgctgtaaggtacagagctgagattataatctcaaggtgatgttccgtcgtttatctttttattacgtgtgtgtgtgtgtgtgtgtgtgtgtgtgtgtgtgtgtgtgtatgtgtgtgtgtttggtgtgtgtgtttgttcatatggaagctaaaggctagttttggccagtgaattcctgagatccacctgtctccatctcctgaccgctggggctatatgcatatgtcacctgtttgactcgtttacgtgagtgctggggaccccaacttgggtcttcttgcttgtgcagcaaagtcttctacaaaatgagctatctcctgagtcccgatattttaggcattgttatgcatacactgaagaagaatggagagagagatatgtggagagacttgtgcagagcaaggcacaggggataatagagggaggtttcctgtcagccgtctgggggcctcgtgttctcctcagaaattctgagcagttgatggattgacagtcccaagccctcatgtgttggagcctgtgtatgggcagtctctggcgagtagctgtgggtctgagagctagaagatttttgctcctgactctggtggccagaggtgtgtggttgaaggtgctcaagttgtaagtgcattcctctaggctttagctgccagtgctggcactgggcagatagtataaccctccgctcttagcaatggtgtgtggcagcagcagtcattgcaagccagcgtcctaactctgaatgaaacctagggtgtctctaggtcttggtagctcttgcaagtctgtggccaaggctctccgctgggtgtggtggcccacacattatcccaccatacactcaagagttagaggcaggtgatctctgtgagtttgcggccagcctgatctacatagagttccatgtcaggcagaactaagcagtaagaccctgtctcaaaccagctttcagagctttaccgtccttgtcttctttgtcactggccactaaccctgcagccagagagagagagacagagacacagagagagacagacagaatgactgactggctcttagagtctcagtctggtgtgtgtattcatgcatacaagcgggtatacgtgcatgccatgtcatgtatgtagaggcaggggtacagccttgtgtcgggtctcacctttcactttgtttgagacagggtttctgttgtttgtttctgcgtaccggaggctaactggtcagtgactttactagggattaacctgtctctgcctcccatttcactgtaggagttctgggattacattctgtaggttctgaggctatgaatgcaagccctcatattttgcacaccgagtcgccatctcccaaccccttccgccgccatcttggtgttccggctgctgctggtggcttcgccaccgacacagctgttgctgctccgttgtgttctcccttggtgcccctggctcagccccctctgtctatgatgagaatctgaagtaggctaaggtcactgaaggaggctttcattagggctaaagttacaacaccagagtaaggggtctcctgactaacttgagaagtgagccagtcagcctggtcacatggctaggaggtgtgtgccaattttgacacaacccctcatacacatgaaagattgtgtttgctccagtgataggccttctgggcaggtgtgctctctctcgtccaagtgaaactatctgcttgataagctgggtattgttcgggcttgtgatgctctggagggctacattcccaggctggtgcaggctctatctggaatggttgtgactgaaacatgctgtttccagtcctggttacagtggtcttctgcagctgctggagtgtcttcagggtgacttagaagtgttcagaatagcctggctgtctgtcatgagggcaacctagctgtttcttgggcctgtggtgtggttccctgttcatcgcctgtcaaaggcctactcctagcagttttaatcaattccagactgaatccgaaggatgtttacagtaaaggctcggggagagcccaacccagatctcaaaattttagtagcatttaacggtgcttaatatagtgtacccagttatgcagagtggagcctaacttttcctctccagttcatcggggagagagctgggtcccctgatctggaatggggagagaggcgggtcccctgatctgggatgcggagagaggcaggtcccctgatctggaatgagaaaccaacataaccacaggcttgtccttggtgggtgtgccagctagctagtggcaacatctgtgtctctgatgagggtgacttaaggagccacacaccgatgtaagatgtattatgtgacatgcttttggactaaacaggatgagttaatgcttgtgagtggcgccaaaatggggggcagggggggtcacgcggtgagcctggttgtgggccagccggttttcatttggctacagctcgtacagtagattcttcgctagtctttttttttttttttttctttttaggttttgttttgttctaagaaaaacacacacaattttgaaaatagacacccactcttgctttttaaggtaaacagattgctgcatggtatcctggggtctgccgagctagatagtctgagttctgcatattcgggcacttgggtgggacttacaggtgttgggagacatgggactctgtgctagtaaggaaaagccttcaaggtttttttgttttgttttgtttatgttaagccactaatctcagaagaaatactctgtgggtgagttgttctctgaacattactgctgaggtctggcccagggtcctatcgggccatgtaaaggaaacctgtctgtttctatggagggtttcctcggccccacactccaatggctaggggtccgggaagttttaaggctttgggtgactgataaaactgtgtcccctgggacaagaaggtggcccttggctgtgcctggtggacagtggcctgcatagcatgggtcctgggcagggtggtctcctctcctcaggtctaatccccggcctctaaggcagcctttctccttgagtagctcgccccacatccctgaatcagcctatataggaaaacaatcaggcccacattgtagaacagccctgctatttacaggacagagaatggggacaggcttgtcccacgacctgcagaaaaggctcaccacagagccttgtctccctgttgaagggtgccttgttgtagcaagagtggacccagccccctgcagcacgtcccccctcaccccatcccagactgtacccccaactcatgacagagaccctatggtcaagacagacatctcagccgggcagaggccccacttgaaggtagagtggctggaccagaaaagtcctgagggccgaggtgcaagctagcagccaggaagacagagcagggctgggagtccagctgcagaaaggtatgccgggctaaggttggggccaggtgttctcgcttgcctttgcagatggctcagggctaagtgggatattctgaaagtgcgccttccaggagtgcaggtggctggatcccaggaatggagaaaaaggtacttaggtggaggggggagggtcggtctgagcatgtggctgtcctataccttgaaggcagtaggcatggcccagctacagagccaatccctaactccccggttggtccgtactacccggcctggggttaactctgggtccttcccgtaggtggctggttggtatgtatccacacgctgatgctggccgggtcacactcttctttgtggtttgaactcatttatctcaggtttctgtctcacagacactctgtggggagggagtggtggcctagagcagctggcttgctgcctgtgggtgtggccctggcagggacttgcctggccccacagcccagggaaggaaggccctggtttatgcttcagcagatccacagatacgtgtaggatagcacagctggggtggcctcatgtcgctagggtctgtcaatccgaggactttgacggcccatgagtgtgtggaagccagaggcctgcgaaggatgttgttctatgatggggacagagaggggccttaattacaagccaggaccaaattgaccatgtctgccctggagctcccagaatcagaagccctggaatcagagcccagagacttcccaagaatgggggtttctcggaggtgggggatgggatgggtggtgacacttccaaagtcaaagatttgtggtccgactgcattttcctgcgacttctcatgttctccagggtcccgagattcatactcagcccacagttgctcacactcctagacctgccccccttttctctacttgactctagtggggctcccacctcccaccatgctatggcaggtttactgagaggggtcctaaagcagccccgttgaacacagcagactcaggcaggggtagtatggacgtccccttattaaaataccaacccatggcttcccagcaggaacaggcttcaccggaaagagcagcaaaccagttattcccaccatgggtatcttcccgaaggctggcagctgccctcaaagcaggagcgcaggcttaccttaactgcccctgtcagtctgttgtccctcactgggccacagggagtctgtggatgaatggatggacattgggagccgtaatccatagcctcgttaaccctgaatttcagaagaagtcagaagagacattggcaaaggaaaaaggatcgatttacagtttagcctgactagagaaagaaagaagcagtgtgtagcttataatgtctaaaaaccaggggctaaagcccaggtctgcagactgagccgtgagagagcttaagggactttcctacagcggggtcagctcggttcaaccaagcaaaccaccaaccatctctgtcccagccagtgggactgatcacaagttaggctgttaacagacacctttatttacttacttgtctttttaatgagtttatatatatttttttttttttaatttaatttaattttttttatttttatttttggtttttcgagacagggtttctctgtatagccctggctgtcctggaactcactttgtagaccaggctggcctcgaactcagaaatccgcctgcctctgcctcccgagggctgggattaaaggcgttcagcaccactgcccggcttttaatgagtttatgaagtaacacatttccttacggcattgtatccttggttttgcttggtatctcagcataccttgttctctgcctcctgatgtaccccagccccccactactcccccatctgcttccaaaccacctgtgttccattccccgcccctcccttctcccttgaagtcttttttttccccatcatggattctcttcttcttcctggcttctccccatacttattcccagttaaatatatgcatttaacaatcagacactaggctgagctgttcgagaaatacagagagagtttgttttgttgttgttgttgttgttttcaatttggccgaggaaaacagggttggcattctgtctcaatgattcccatttatgaaagaaaggagtctccataagttttatgggatggcaagtggaaaatccctacctgtcccgggccctgcagacttccttcctgtgtccactcctttgatggatgtcggacgcaggtttttcaacttcaagtcggctcctgcaggactgtcaaacatactaattttgaaaatgaagaaaaaggtggggaataagcgtctcctgtgtcaccggaactccagccccttttctcagttttggattttagtgacagatgtgctatttctggggatctgcaggggactgaataaatgtccctccagacatccatatcagagcctgtgactgttaggtgacatggtgaggggcctagcagaagctgtcatgatctgatgtccctgctaattcagatgacccagaatgtaatcatcagagtcatggcaggaggtggagctccttgctgctggggaagcgggtggggaagagccctccactttccaggccctggtctctggggcctgtgaagtaaacagataagagacggatcaagaggagacaagctggctgactttaacatcttccttcgtgtgtatttggcacccgacagaagagaagtcagacccagaagatgcagatcgggggcttcaaatccatttaaataagtggtgataaatcactgggaagagatgagacaaaagagggcaggggtgggggtgtgacttctgtaacagtgacctagaaatgtgggatgggagggtaagttccttgaagcctcatctgctcttcctggtgtgggatagacagtacctggactaatgaaaattgatgtcagagcctgaggaccttgcagctccaacaagccagggacagccacctgtcctcagtgagccaattaaaaagtaaacagtggtgaaaagcagaaaagggaggtttattcaatgggctcaccctgggaagacaagaaatcaggcccacccatacacaccagggcctccagtggttcacccccaccacagacacaccaggatcatcctcagggctccgagggtccacatgctaagctgtccaggtcacgtggtcaggcagtatttcagctctagtctcttcggcggcaannnnnnnnnnnnnnnnnnnnnnnnnnnnnnnnnnnnnnnnnnnnnnnnnnnnnnnnnnnnnnnnnnnnnnnnnnnnnnnnnnnnnnnnnnnnnnnnnnnnnnnnnnnnnnnnnnnnnnnnnnnnnnnnnnnnnnnnnnnnnnnnnnnnnnnnnnnnnnnnnnnnnnnnnnnnnnnnnnnnnnnnnnnnnnnnnnnnnnnnnnnnnnnnnnnnnnnnnnnnnnnnnnnnnnnnnnnnnnnnnnnnnnnnnnnnnnnnnnnnnnnnnnnnnnnnnnnnnnnnnnnnnnnnnnnnnnnnnnnnnnnnnnnnnnnnnnnnnnnnnnnnnnnnnnnnnnnnnnnnnnnnnnnnnnnnnnnnnnnnnnnnnnnnnnnnnnnnnnnnnnnnnnnnnnnnnnnnnnnnnnnnnnnnnnnnnnnnnnnnnnnnnnnnnnnnnnnnnnnnnnnnnnnnnnnnnnnnnnnnnnnnnnnnnnnnnnnnnnnnnnnnnnnnnnnnnnnnnnnnnnnnnnnnnnnnnnnnnnnnnnnnnnnnnnnnnnnnnnnnnnnnnnnnnnnnnnnnnnnnnnnnnnnnnnnnnnnnnnnnnnnnnnnnnnnnnnnnnnnnnnnnnnnnnnnnnnnnnnnnnnnnnnnnnnnnnnnnnnnnnnnnnnnnnnnnnnnnnnnnnnnnnnnnnnnnnnnnnnnnnnnnnnnnnnnnnnnnnnnnnnnnnnnnnnnnnnnnnnnnnnnnnnnnnnnnnnnnnnnnnnnnnnnnnnnnnnnnnnnnnnnnnnnnnnnnnnnnnnnnnnnnnnnnnnnnnnnnnnnnnnnnnnnnnnnnnnnnnnnnnnnnnnnnnnnnnnnnnnnnnnnnnnnnnnnnnnnnnnnnnnnnnnnnnnnnnnnnnnnnnnnnnnnnnnnnnnnnnnnnnnnnnnnnnnnnnnnnnnnnnnnnnnnnnnnnnnnnnnnnnnnnnnnnnnnnnnnnnnnnnnnnnnnnnnnnnnnnnnnnnnnnnnnnnnnnnnnnnnnnnnnnnnnnnnnnnnnnnnnnnnnnnnnnnnnnnnnnnnnnnnnnnnnnnnnnnnnnnnnnnnnnnnnnnnnnnnnnnnnnnnnnnnnnnnnnnnnnnnnnnnnnnnnnnnnnnnnnnnnnnnnnnnnnnnnnnnnnnnnnnnnnnnnnnnnnnnnnnnnnnnnnnnnnnnnnnnnnnnnnnnnnnnnnnnnnnnnnnnnnnnnnnnnnnnnnnnnnnnnnnnnnnnnnnnnnnnnnnnnnnnnnnnnnnnnnnnnnnnnnnnnnnnnnnnnnnnnnnnnnnnnnnnnnnnnnnnnnnnnnnnnnnnnnnnnnnnnnnnnnnnnnnnnnnnnnnnnnnnnnnnnnnnnnnnnnnnnnnnnnnnnnnnnnnnnnnnnnnnnnnnnnnnnnnnnnnnnnnnnnnnnnnnnnnnnnnnnnnnnnnnnnnnnnnnnacagtacctggactaatgaaaattgatgtcagagcctgaggaccttgcagctccaacaagccagggacagccacctgtcctcagtgagccaattaaaaagtaaacagtggtgaaaagcagaaaagggaggtttattcaatgggctcaccctgggaagacaagaaatcaggcccacccatacacaccagggcctccagtggttcacccccaccacagacacaccaggatcatcctcagggctccgagggtccacatgctaagctgtccaggtcacgtggtcaggcagtatttcagctctagtctcttcggcggcaaggtcttctgacaagttatggagctgtcttgagatcttttccctgggagagagttcctctggcttgtctttctctcagtctgagattactgggggagattccattttcctgggtccattgtttcaatagcctgatagccagaggcaccgggtgtctttacaatatcttcattcctgccaggactttgcaaagtccttacctgccttcagatctcagcagtcctggtgacagagccctccttggcctgggacactgggctccctcccacttgctggtggtggcagtggagggagctcggtggtgagggaagcctactgagtggagaagcccaatccaggagcttggatcagcagccatgagctttcagccagctgttctgtaatgtatctatattgtttcataccatttggagtccgtttcaacaacgtcctagggagacatccgtgctccctaaaatgatgtagtcttcaggggtggggggattgggggccattgagagacaggcaaggtctgtgatggccctgccgggcagggatgcaggaactctgtctctgccagtgttggtgaaggaacagcaaggtaagggagtatggtgggcgttaccaggccttggtattcccaaagggaagttcctgtgagggatgggcacagatagatgtggctaggctagaaggcagatcagagtctcagctgctcaaagagctaaggaagaatcatttgagcctagtagttcagggctgtcttgggcaacagagcaagacttctccccatcccccacccccaagacaagacaaaatgaaccaaaaggataggctatattggtcagccacaaaatgggccggtctttgttctgcactaccacagccctggggacctgtctggggtgtgtgctcttggtgtgagtctactatgagtttagaactaggcaagcagccacaggctctgggctggcagaacatagaggtcagcaggaacagagcttaaaactaaccattttcctggtgcttctgttgggcgcgtccaggaagtggaaccagccagctaggagaggttctgtaaagcttactggcctggttgtgttctctgggtggcagcggtttcaggtacagggctcttaaggtgccaaggacctgggggacaggcaggaaggtgattcctggtactcttctcagagtgtcatcggggcacatgctcacaggctggtctggcaagcatggatcctgtagactagtcccaagcccaaagtgattctgttgctgaccactcttcacccaggcctctccctctgtgacttccctgcctctcctggccacctctgtgtcagttttctgcctacccactgtttctggaagcctcttcctagtgcttgaaggcttctgtcctagttactgaggggcttagagaccatggccggaagcaccgctgacagtttacattgtatccaaacgtctgcttcagacaaagcaagacagcctggagtgctgaaggtttttgaaacctcaaagcccaccccagcaacacacctgctccaacaaggggcaagcattcaaataatgagcctgtggaagccattttcattcagatcaccacacttgggctaccactcagggcttggagcatcatctcagcttaaatgtttgcaggcatttgagcattgtggtcggggtgatacgtgaggtttcaggtccacttgtgtcctggcgccctggccagtgaatcctttcctctgtggatagtcttaggtagtgtgtaatcccttcttttttctttttgtgaggcagggacaccttgtagcctaggctgtccataactcttgctcctcctgtctccagcgctgcaattccaggtgaacaccgccatgtatggtttatacagtgctggctggggttgaattcaggacttcatgtacactaagcaagccccctgccaacagagctacctctccaagaccccatttttcttttggttgagatagggtcttgttgtgttgccttgactggacctagaactcacggctcaagtggtcctgccgcctcagaccctgaacagccaggactgaagtgaattgaagatccattgacctgaacgtctctgaaagtgagagacttggtggttttgtgtgtccatttgacacaagctagagttatcacagagaaaggagcctctcttgaggaaatgcctccatgagatccagctgtaaggcattttctcagttagtgatcaagggtgggagggcccattgtgggtggtgccatccttgggttctataagaaagcaagctgagcaagccagtaagcagcacccctccatggcttttgcacccactcctgcctccaagctcctgccctgtgtgagttcctgtcctgacttccattggtgatgaaccgcaatgtggaagtgtaagctgaataaacccttccctccccaacttgcttcgtggtcatgatgttttgtgcaggaatagaaaccctgactaagaccgaggctgacctaagtcagagcagtggtggcggatgaaggcaggtgaccaggcaggcagtcggcagtggctgtcagtgctggagtgatgcttgtgggcttcagtccttgcctccttgagaggtcactccctggggttggggtgcagatctcctgggcctctgtgtcagcacaaaagggcaactctgctccccaggtgcacatgggtcggtcggactgagccactctgcccggctctgactgccacaggctggctgtgtgccactctgatctctctgtgtgtctttcacttttcctttctagagatagatttctgggtgagcagatgctgctgagagatgtaattccctcgagccccaaagacaacctcttcccgtcttaaactggttcagcatggggggtgggggcgttccccagtcattgtagacaaaacaaaatgtcctcctaagaattgacctttttgggtttttttttaaaagacttacttttctgtacatgtgtgcacatgcctgcatgtgtgtgtgcgcgcgcctgtgtttattggaactgggtcccctgtaagatcagcaggcgcttttagccactgagccctcttttccagttggagagttggtttttaagttgcttccccttcagtcatgtctagactgttgacatcttgtgcattgttgtcatacatagaacttgcacccaagaaccacaggacctagtgagctaggtaaagtctcattgagttctaagtgagcttagaggttttttgtttgttttgaaacagggtctcactggagagccttagctggcctagaactcactttgtagaccaacctggcctcaaactcatagagatttgcctgtctctgcctcccaagtactagggagcttatggatttttattgggccacatttattgctacctgggacccatgtggatcagcaggtgaattaagccactcgaagtagtccatttcaataactttactacaacccggtggtggccaggtaatccaggctcaggttgctgctgctacacttggtctaactgtgcctctgggtgtggagggagataatgaacttcggagcagaggcgtgaagatggaggccagaacggaacagcacagctgtgaagatatcaggcaggggcctaaggtgctaagtgcttgtgagggcacagatcttaaatgaggctgaatctctacgggtgtcaggaatgcccttcggggatactgagtcaggatgcatcagaagagaaggtgccaaggtgagaagtagccgtggctacttgatactaaggtctattgaccccggggggggggggggtgcaaatcggatgatgcttaaattctctttaaattcctaacttccagaactgaactcaggtcattccactcatgtgcaagtaaccacacccagatcagcctaggggcgtcccgtgtgagacccacttacagctcaaaagcaggagctgctgcctaccccttcaggtgtgggtctgtatggagctgcccggcccagcctccaggcttcaccctcaggggtgtgattatggcagagtagctctgcatttaagcgctctcctattgttttgcatttaatactgtattgtgtttgtctgtacttgctgagaactgctggcatgcatggcttaatgctgcctgtgttgcacacctggctcctgttatttgcttaacccttcctgatgggcgagcttatgctaggagatcatttttgctttgaagccaccttagagataaatatctccaagctggcatctccttgaacttgagggattgcatggcattaactgtcaggccccagatccctgctcttctctggaagctgcatccagagggtacacaggcacctttgcttcttggtggaggtaagatgaagttgggtacggctaatggatggactgggtagggctgggcaggacttgccggctggggcaatgttgctacaaaacttcccctccttacgaaattctgtgatgcactcactccctgtgctgaaatccccttcccatgactgaactgttccctgcgcctgtgtcacttgagtttcccctgtgtcatgtcactccctggcccctccccaaaggctgtccaaattatgtctttcccacctgtttttggtggagatcagttttagttggccttgggacagggaagcccaccatgatcaacctacttatggagaactcagcgtctgtgtggaacccgcatacccccacccacccaggcttcatcttcttgggttgctaatgtgatgcagcatataccgggccagtagtggaaggcgtaaggacacgtgtgtgcacatgcagcccagactcagcagtttcttcgtgtgtctttgtgtgagttcatgttcacatgtaggtgggcacacttaagtgtgcaagtttagtgtgcaagtatggaagcccgagaggcccatatgagggtctgctcttgcaacatcacacgtaggctttcacgtgggctctatggattgaatgtaagtcctcaggtttggatggcaagcacttaacccgctgagctacctctgcgagccctgactttctctgcctttaaacacacgtatgcctaacaaacagtcctgacaccatgggagcccctgtagttccaagaatggagcctcttcatcttgcacagctgcccccggtctgcattgtttggggccttaagcctgttacttgcactctcttctgcctgtggatagggggagaagacagaatgggactggtggatacatgtgaggtgtcgtctttcattaggacacctcaccacagtcgtcagtgtggaaggacctggagtgtcccaggcctctggagtgtcccaggccacctgggtgctgagctcacttgaggacaaattgttgtcttgaggcagagattatttgcaccctggattatcatggtgaaagaatgttctagaatcttggcttttccaggtgatgcagattcctgggaattctaaggttcactgctctaggcttggcaggaggcagatctgaatgtccagtcagcattctttccctgtacttggggatgagtccatctccttcctgtggccccaagagacgcagcagtggccatatccctctgcaggtgcattactgtgtctggtgacagtgactcaccagctctcccttgttccctgtgactgacccaccatgcttcactatctgaatcatctaggaattgacacagcacagaacaggaggcctctcacctactctggcatgcctggctgcttgcaggaccatcctgtatgaggctcaccagactcatcaggtactcagggccagggtctttaagtcaacccagagctgtaggacctgggtttcccaatccatggagatctaggctgtcaggagcagaatggctctcgttagctggtcagtgaggctccagttgctccttccctgcttgtaatgcacagagcaatctgatttctgggattcctttggtctaatgatagtgggttctccctgggtccatttctattggaagatgggttcttgggtcccgcccactgcctcagggacacggtgaatgctgttctgataggagccatctttatgtctttatggatcatttcctgcctccagtgacttcaggtatgtgtaacagaattcgagggccgctccaggtcatggactcatccaaagtggtttccggatgcttgtgtcacgctagagagtggttctcaacctgtgggtcagatacactgtataacagatagttacagttatgaagtagcaatgaaatcattttatgattgcaggggggtgtcaccacaacatgaggaactgtattaaagagtcacagcattaggaaggttgagaaccatggccctaaaggaagtcaggaaaaaaaagctcccgtgagttgagagaccgggtaaagtgagtttggggatagtttataatttatggataacagcaaacaagtctctggagtgttcttgtgtgtgtactaccaggcacatgcatgtacaagcctgtgtgccacaacacttgtgtcaaaggacttgatgacaggcactcattcttgctgagtcatcttgatagcctgttacatcttgcccgagggccattttggtatttggagactggaagttcatagagattctggctggaaaaaacaaaccaaccaacccatggcaacagttgaaccataactgtcttgggtcaaatgaaaccccgacaccctcacagccatgtgtgaggtagccgtttcatctcatggctcgccctcaggtgttcagcctacccatccacagtgactacatgctgagcggcggttaaaagcattggctgctttggttccactgtggttaagaagcagagacagggcagtggtggcgcacgcctttaatcccagcagtcaggaagcagaggcaggtggatctctctggagttcgaggccagcctgatctacagagtgagttctgggttagccagggctccacagggaaaccctgtcttgaaaaaacaaattaaaaacaaaacaaaagaagcagggatacgttttatcctgaggctgaggcagggagagcttaggtttaggattcagaggccaggcctggtgacacagtaaaacctagctgaaaaagaaaaagagagagaagagagagagagagagagagagagagagagagttaacagatccttaagatgcagtgaagttgcttaggtatggtttgggaggtttctggaggaaggcagggatctgttgatagtcagggtgacccacacagtgtgacaattgacagttggcagttagacaaactggaaaccctgatgagacaaactaggggagcttgcttactgggccgtgcatacagagaacaggcagcccctcccgtgggtgtaccacatcctcagaaaggagtgaggagataaccgcccactgacctgggccctgtctgccgaatcatgattatgacccttgtgagctggccctgccttgtaattttgctgtacatttctgaggagttgctatagatgaaaggaatccgctagggcagcattttgtggtctggggacttagaaaacaaatcctggttggccgcggccctgccctctctggctttgtgcgctcatccatcgcctatgcatgaactgggtttgagagctgcagggcagaaggacccccagcccacaggcagagctgctgccttgctcttctggtcccttccctgtggtggccttctgctgcattccgccagtccaagtgtcttccggtgctctgtccaacccgtgcttgccacggagagtgatagatgttctggaatttaatacgtgccatccaggcctgtggtcattgcaagatttagtggttcaaaatctttgttgcatatagggaagagctgctgagccaggggtggggtggggggtctcatgtagcctacgttggccttgacgttgctgtggagctgatgataaccttgaactctgctctgcttcctttagactccacagctacagttatgagcctgcagccatcaccaaaaccggttttaaacagtgtgggtttcttatcttagacttctcgaatgctagtcagccattccagcccctgagctgcacacagcctgagccccgactggacccttaaaatgctccaggctcgcttaaagccaagtgctctgctcttttagcccgtggctgagccatctcagggaagcctttgtgacaggctacgttttaccagtagcaagattgccagttaacactcaccagctagctcttccttggacgccatgcctgggattaagttcttcacacagatcagcctcagaatctcagaggtgaggcagtggtaacttctcagcttcccttttctgaaggaagaaaatggctcagagaggcccagcaacttccttaagaccacccagcttggaggcgccagtctttgagccgatagtttttgaccataggaccctttgatccagttattgctgggaatataccctctcaccccnnnnnnnnnnnnnnnnnnnnnnnnnnnnnnnnnnnnnnnnnnnnnnnnnnnnnnnnnnnnnnnnnnnnnnnnnnnnnnnnnnnnnnnnnnnnnnnnnnnnnnnnnnnnnnnnnnnnnnnnnnnnnnnnnnnnnnnncacccccacccccgagctgctgtcctagaagtaagaggcagggaggcttctggcttctgaaattggaaagcttgctctcttcttatgagtgtcttccttccttctgcaagccacaggagctgctttgttaaggaggaggctaaggtggcatcttaaacccacacaggagggttccatgggtagggtgactggggtgggagactaattataacttgtgtggtttttgtgttgaggaagcaggaaaaaaaaaaaaaaaacggtctgagtgaggggaagctacaagctgaagactcagggtctgggaggctgctgcagccagaagctggttgtgacttgaatttggagctggctagggccagagactagacaaggacactggagccttggtgggcaggaagtgggtacagacagtgagtccaagtgtcagagccagtcggtgtcacagggacacagaaacccggaccacactgtcagccctggctggtccttcattcaggaagtgacaagcgtgtggaagggaatcgttccatatcataattctaggccttcactgtgttctctgagcctttccgggccgtgtcagttccttcccttatccccctaagctgtttcctatcctaaccccaggagagatgctacccctgggacaggagagaccctttgagtgagtcaccttatatcatttgcagactgccattggagatggcgtgtgatccagcgcgctaggggagacgtgagcctgggctcagttggccctgctccagaagcttccccctccaacacttagcctccagctgtccacagccaaggttatccctctgccccaggcagcgtggggtcactgggctcagggagtctgtttggaggcctctgtcccagatgctgatgggtacatacagatgcctggccctactccacagtgggtacttgtttctgtttagctttaaaacgactgcaatctggactgtggtggcgcacacctttaatcccagcacttgggaggcaggggcaggcagatttcagagttcgaggccagcctggtctacagagtgagttccaggacagccagggctatacagagaaaccctgtctcaaaaaacaaacaaaaattgatcgcaagagataagagaggggctgaggtagaccttagaggaggactgctgatccggtgtgaaccagcctccacgttctgtctcagaactaactacctaaaatcaaccaagactcgggatgagcacccatttaattcttatgactatgttgtctgtgggtttcccttggtttccttgggaagatgaagggggcacagatctgaaattaggactgatgaactggcttggccagcaaaaggagcttgctgcccatctcaatgacctgaattggatccccgggtcccacaaggtaggagagaacctgctcctacaagttgcccttggacttccacatgtgctgtaatgtgaatgtgcccacacatggacatatgcaataaataaagtcttatttacttttttaaacatctgaaaagaataatacgacttggttagactggtttcgtttttgtggctggttctcatgtagtccaggctggtcttgaatccactctgcagccacagatgatcttgaattctggatggagggctgggattacaggctcacaccaccgtgcccagtttatgcggtgctgaggataggtcccagggccttttgcatgccaggcaagctttctaactgagcctagtgataagttttctaatgtatggactctgctctctgcgatggggcagtatgcttagacatggctgtggtggctgagtgtggcgacacacacctgaaatctccagcactgggaagactgaggcaggaggatatcgagtttgaagctcgtacggactacttagcctgaccaaaattgcttttatttgtctgtctgtttgtttgtttatattttaatgtgaattggtgttttgcctgtatatatgtctatgtgaggttgtcagatcttgagctatagacagtggtgagccaccctgtgggtactaggaattgaactcaggtcttctggaaaaacagccagtagtagtagccagtgctctaaacctctccaagccacctctctggcctgatttttttttttttttaaaggagaaggaaagaaaagagaagtggttatttgtggtgtctgtggtgaggtgagcaagcaagcgcaccagctgacccaggcttcccctttgctggctgcccagcacctcacttctggtgcagtgaacaagccccgcaggaactggataagagaggtcatctgcttggggccctaaggagtttgtatttagtgcctgtctgaaacccaagcgccccgtgagggtggaggacccaggggcttgactcttagtctctcattactttcagagatgtcttcctgaagcttccattctaaaggtgccaggaacaaccccagagactcacggcacaggtaaatcattccgtgtatgatttctatgtccaggtcggtaagcgataccttgtagaagcctccattgggtctggtggactgtcaggtatcttgttcctatatcttcattggagccaagactgctgtccctcagggcggcaccaggctttgatgctagacagtgaggttcctagatggtcttcccttccctgtctccatgtcctcctccaactcccatccctcccaagtgatggctgctaatggtatgatggttctgtgtgcacctcacgtgtgcttgctctactctttaggggtatagcatagcatgtgtccatcatgtccctgtgtgtatgtgtgtgtgtgtgtgtacctgtgtgttcatggctctacatctgtgtgataagttgtctatatgcctgtgtgtcctacatcaccgtgcttaactgtgtgtgattgtgtgtcctgtgccacttgtgtccctgtgggtgtgtatctgtatgatgaccagcacttcctctcatgaacttggtgtggaccatgccagccgtactacaccttcctgcagtgaggcatagcacttgagagatggctctctacacgggatttgggatgcattttagttggacaaagctaagagaaggaaccagaataagtataaaactcctcttccctctgcttcttctcacagcctgccaaggctgtggtaaaggagtagggccctattgggaatgtgcgagccagttatacacattcagtttccatggctatctgggtgtaatttgggcaggggccttgtatgtgtgagtccagtcatgtgcatgcaatggcttacctgtggagattagagcataactttcagagttggttctctctctccatcatgggtaccaaggattgtgacccaagtccttaagcttgcagagtggcctgcgtcatctcagtagccaaggcctcattattcctgaagaagtctgcagttggcgctgaggttctgagtatcagcttgtttcttctccttctccttctccttctccttctccttctccttctccttctccttctccttctccttctccttnnnnnnnnnnnnnnnnnnnnctcctcctcctcctcctcttcctcctcctcctcctcttcctcctcctccttcttcccctcttcctctttgaccatctgtttttgaattttgttggtctatcagatgtttctcatgttccttagatttgaggaattcgaaagtacaggcagtttcgagcactcagagccacactaaataggaagaacccagctgggcagtagtggcgcatgcctttaatctcagcacttgggaggaggagaaatcaaacagatttctgagttcgaggccagcctgctctacagagtgagtttcaggacagccagggctacacagagaaactctgtcttgaaaaaagaaaaaaagccctgtccatctgaattgtagcccctctccctcccaccccacagagagtctctgtgtagatcaactcttgctctctatggtgtgggccatagctcccatgctctataccttccgtccagtactgtggagggatgtgacaggtacaagaaggcccaggcccacccaccctggttgctgactgggtgcacctgctggcctgctctcgtgagggagtcagtggcaaacactgtggagagtccttgttctcacagttcatagagctgagtcccaaaaccaccagggagccagggagtgtctctggcttatttctatcgtgccttccccccagactcctttgtcctccaacagcaccagcatggcactgactgttagagacttgggatattatgtggtgtttgattttaaatttctttagaggagttaggcaccacccacagagcctattgtgcagctaggaaacattttataataaaggaacattaagaattcaaatgaggtgcgctgtagcttctgtagcggaaatttccttattctcttgggcactaaagcaccactgccagtgaccccctgggtaagctgtctcctggtgtatacagtgctggcttcctgggctgggtttcgatattaattggctctctggttagaggcagctgcctctgttctgcaggtcgaagcttagggctgagccatgcaggttccgtgtctggggaaggcccctcttggctgctcgtggtgctttattgtgtcccatctggtgagaagggaaagggagactgttctgtggagcatcctcaagagccttcctgacctcgtgaccttgaagaggccccacccacctcctttcaccatcattccggggctcaggactccacacagaaatttagagtgtcctagtagttctcacggtagcagctgaaggtttcttacccagggccagagggctgccatcttatccctggccagccgctctcagtacaggtctgcgcggtccgcgggatccaggactaatacccagggtcctggaggagagtaagaactagttgggggcctgtggggctggaggaggagagaatgactcacaggtcgccaacctatacaaagaaatggtgttgtcaggatttaagcagcatcataacaatgacatgcctttgcccaggtctctgcagctggccggccactggtcctccacggaaccctgcttcatgtctggctctccctgcctccttagcgcacaccctgtttccgttactgttccattggcaccatggcggtcactctccgtacctggccacccagcgtgacacctacccaatgctcaggtttagggcatgagctgactgagctaaggccatctgaggcttgcctgcccctatgaggtagcttgagattgaatgctgacctagatggagatgtccagctgctcctgctagctagctgggctttgccaatgtaactacagtagggcacgtccctgccaactggaaatcttggctctggggatactctgaggcctgggaacaccagagctgggacaacagctttgtgtcaggcagccactccggagctcctggacccctcctgggactctccagggacaggtcctctggaattcagcagtcaggctggtgacagtattacctgggccagcatcgtagaggtgggatacctggctagtggctggcagggtgaggttggaaggccacacccggctgggagggaaggtgtggctgcactgttttctggaaccatagccaccagagtttcacctcctgtctgagcaaacgagcagctaggaatagacagagcaggctcctgtggcctgtgtcttcaggggtgtggagtccagggaacaatctgccgtaccacaaccactcaagatccccaggttgtgtttgctgtggtgctcaggagggtgcctgaaagtctatcttgtccccacaggagcacctaatggtaccctctttgtgatctattcccgttattagatcccagtgaggaaccgtaagtctaagacacagtacgtgtatacacacacacacagagagagagagagagagagagagagagagagagaggtgcatacctaagtgcatatctgcagatgtactcacaaacatgtagtcatgcatgtttacacacatctgcagatacataggtatgtgtgcacatgtgtatgcatgcacttacattgttagatgtcatgttacatgtcatatgcatgttatacacagagataacatttaacttggcacttgcatgtgtgcccatgtacatatacataacagacatggcatctgtgcacacacatgggcatgggtatgagcacaggtaaacacatgtcaaccagcaacacatgtcgctggttgacatgctgacacagatgtacacaagttcatgtgcacaatgtgtgtgtgtccactcatacacacacacagtaccctcaaggccattagcattctcaggccagagcaaggtgaccatgccctggctggggtcggtcctgtctccagttgcagcccctgctgagatttccagggtttgctggaggcagagagttgccctctgacagcccaggcagactgcagagggggctgcagttctttctcctgggtttagagtaggtgatcagccctcttagtgtagtaatggggccttcatgaccctgtctgtaatgggatgtcaggccttcttctggagggcctcagttgtcgcaggggagatctcagctttccctgggggaagggcgatgtatctctttgtttaaatttaaacaccgagagcaaggtcctgaacttggcattggatggagccgttcctggaaggcactgtggcagcctgtctgtgtgggtgtggcaggcacattgtttcaagtgagttttaaattacaccaaacagtgagtagtgtagagaaaagaagaaaagtcaagcccaacgccttcctccccttcctctacttctctgctccccccctcccctcctccccctcctctacttctctgctccctcccctcccctcctcctgttcccaggggcttcttttaaagagcaccagggtgttggcaaggcttttgccctctagtgtctgcccatggaataactgtgctctgcattgtggggttgggtctgcagggcaggagcctgcagctgtagtgagcacagcctggctgaacttgctctgtgcttctgttaaggcagcccagggccccagtaaaccccacagttcctacttttggtcaagactggcagaggagtttgctggctgccactgaaggccagaaggtggcattggattcccctggaactgaagtcccagatggttgtgagctgccgtgtgggtgctgtgagtggaagccaggttttctcaatctacaagagcaacaactgctcttaacctctgagccatctccccagcccctaccaatgcgttttatacagctgacatccaagggcagccccagccagaccaccctgggctggtgaagagttttggttatttcagccacttaaaaaaaaatgtttctcttaaaatttgttttagtcttgtgtcctgactttttcactccaggcacaagctgaggctcttgctctctgccccttgtcatgcacctccacccctcccccaccctcctaataaatgtattccccaccccccaccccctttggtgactgaggctgcactgtgggccctggtagcacattctgattatatttccactaaggaccattctctcttcccctggggttctaattgctccattttgagtgtttggtaattcattcttagctgttggtgcagcatcttagccatgttatcaggccccagcctctgagactttcctttttgcagctgatagaatgagaaaaaaaaaaaaaacccttattattctatgttcacagaatggctgttagacctccagacatctagtcttgagtttcagatagcagcatcaagagcgagcttaggggtccaaatgctggtgtttttttttttttttttttttattattgttgttagcctatttcatggaattgtttctagtgctttccacttagatttctttaactagaagcagggtaagttacaaaggtgttgaactgggcgttctgcccaccagtgagagctcaggatctgttacctagaaggaggcaggaagtcacagaagcaggaggaggccaggctgggtggcaggagatttgaggggaggggagagctactgagcgtggggaggggcagttggatgaggaaggaggtgcatccaagacaagtttgcagattgggtgtccttactagccatggacccagccagagagtggggctgcaggtaggtgagtgtgctttagtggccagtgccttccttgtcctcccgtccacgtggttgactaaggagctgagggagtagtagggtttcatcctgggtctcggggatacatgtgtcttgtgacactctcacagctctgagaaggaagacgttaggtttctaaaatcctgtcctgatgctcgtgaactttaggggcagcccttctgcaccctgcccggcatgtcctttcatgtttctcagccagatgggtctcactccttgtggtgtctatgaaccacctcctgtccttccgtgctgtggtggggcatcctaattagcggcttgcgtgtccatcagctcacaggttcagggcaccatgttgggtctggtgttgggcaaagcccttctggtctgttagcccctggttctggactctctttcttggtatcttgctcggccccaccccacttcttttccagggcttaattaattagcttgttgttaatcaatttttgttaattaacaaaataattaattaaatcctgagccaggacctcactgtggaaccacggtaggactgggactcactgtgtagactggagcctgcctcccccaccccaccccaccccccccagtgttgcgattatggcctgggactacatatagactaaactagcaatgaactcacagagctccctctgacctatggttaaaggcctgtgctaccacctattaattttggaatctgttttgtatctttaaattttatttcagtcagggtcttctgtagcccagactgacctcagactacatagctaaggctagccccgaactcctctttcttctgccttcacctggtggtgcattgacattctaggtttatgaagggctggggatagaactttggggctttgcgcatgtgaagcaaacattctaccaatagagataaggaatgttttcttttctttttttttttttttaaataatctatttatttattacatgtaagtactgtcttcagacacaccagaggagggcgccagatctcattagggatggttgtgagccaccatgtggttgctgggatttgaactcaggaccttcggaagagcagtcagtgctcttaaccgctgagccatctctccagcccaggaatgttttcttataaaaaatgttcaagcaggaatgtgacctgcatgaccttggctggcgaccctggcaggcgttcagccttctctgttcacaccaacatctacttccatcagggggatgtgaagaggaaagaaatatccatgtcccatgctacctgaccctcgcagctggaacaaatcagagggcctcctgcgtgtcacagctcccttgttctgctcatctccagtttctgcaacacccaggatcttctgggcttagaccagtgccacctgtgcctctgtacctagagggtgcttgagatcagagtggtgttgctgtcctggctttccttagctgtgaatgctcagtgttggagggagttggtcaccatggcttggaccctagcaacccacagcccccttcctcactgtggcaggagaatgggctcttacgcgacaggacgcagcactgtgaacttgctcagcaaaacgcagagttcataattgtcggactcaccactgtctgtttcccagtcactgcctcagttcttggcttcctgctttctggttggatcagggtaggagtcaccccttgtgcttggctgctgtgaatttctagggtaggacaggggtccgtctggctcctattctgtagaaccgctgtctataattggagtcacctctttgcatgtcacctgtatctccttttgagctatagcgatagttaaggaaaatggtgagctgaactggcttagaatatcccactccttggaggaaggaggggttcgggctatctttaggaagcttctaaatccattgggatagaaaccagacagtcggggctggtgagatggctcagtgggtaagagcacccgactgctcttctgaaggtccagagttcaaatcccagcaaccacatggtggctcacaaccatccgtaatgagatctgatgccctcttctggtgtctgaagacagctacagtgtacttacatataatcaataaataaattataaaaaaaaaaaaagagagaggaagataaagaagagagggggcactttctattttaaaaaaaaaaaaaaaagaaaccagacagtctgtcctttagtaccggacagactaagggactgaatagagatgctggaagagcctgccctgccctctgtgggaggaagggtggggcaggggaggcctggcaagtgggtagatgccatgccagcattgggctcacatctggagactgttgtgctcccttcagcttctagtaaccacacccaaaggtgaggcggatctgtgtatcagggcagctggtgagtgactcagcgctgagctctgcatcctgggatcctggtgtgtgctgggcctcaggcttggctagggcaggtgaggacagggacagaggctcaagggacctggccacaagtccatcagacagcaaagcctggtcttctgtttcttgtttgtggacaaatcagagttaattgctagtgtttccatggtaattaacggcttcctggtgaggcaggaagagctcgggttgcctcctgggctagctatgacttttgatgtgacccactactcctgcagaatggggccctgaggctatgtcttcatgggtacggaggttagtgtgtgcttacatactgtatgtatgtatgtgagcacatgcgtgcattttcgtgcacatttgtgtatggctatgtgcattctgtgtgtctacccatgcatgtgcacccttacatgtattcccaggggagtgccctgtaaccgcaaacctctgatgtctggtaatattcctgggttagcatgtcagaagttgggaagtgagccctccagggaaactgagacccgtactgttcctttcagttgtggcatgtcaccaagcacctggctgtccctctagctagttatttccaccttggtgggtccatccatcttggtgtgttttagccttgttgtcttctctctgtgggatctgtctgtctggcagccccacaaatcctggatgccttccatgtccctcagcaggcaggttcagacaggatagacagtagaaagggatggaggggactgagaaccatctggagccgctgggacctatagtctcgtcctttccttcttttgcaggtcagacgggaacaccggcagccttggcatgacgtcgtgaaggtggccattgctaacctgacatgtggggactcaggaaccccaccccttatgggctccagtctgtgctgctggccccagctctggggctctaagaggtccttgctgctaccccacagcagcctgctgccatccatgtgtgcccgttgctgaaggcctcggtggcccctgcccatgaggatgtgtgcccccgttagggggctgttcttggccctggtggtagtgttgagaaccgcggtggcatttgcacctgtgcctcggctcacctgggaacatggaggtaagtgagtgtgagccatgagtgagtgtgagtgtgggtgcagcagctctggagagtgtggggtccctgctttggatgctctgtggggtctgtcagggcaggcttaagccgctgggatgtcaaaggatgctgtgtgaccaggagaccccacagcaagcgccaagcttaggttggacggtgtatgtgacctcagtggctcacggcttacttaatgctgacgacatcccaggtacttatgctgcactgttgagattagctcagcctcagagaggtctccaggcccgatttccaggatggggacacactggctgtcccacattccagggagggaactttgtgaagacagaagccgggaagcaaagtgcactgagaatgtccaactctgaagctacctggacactccgggtgctgacttgtaggcaagttcagatgaagttcattgatgggggagggggcagaatgctgagctcagcatcacagcaggaacctccacactcaggaagttgatgcaggaggatcgtgagttccaggccagcctgggccacggagagagaccctgtctaagaagaccagtattgtgtatgtcctgcctgtgttaacatgttcttaaactggtgcaggtacgaaaaagcatcacttgtctctggaaatcattggtaatgagtgtaaatttgttttggagagagatgtgtcccccccacccccacccccatcatgacttttctttttttaaagggggcaccggggaaagaacataaaccctgcacacactaggcagatgttctaccaatgagcatctcagcccctcgttccagagttttcggtgttgagggtttcagagtaaggcatttacttcacgagtgagaaagttctcagtcattacgtattttgagcctacagtgggtggttaaagacacattaaagaggtagagtgtaaaccaagtgtcttcgtcagggtttccactgctgagaacagacaccatggccaaggcaactcttataaaggacactgtttaattggggctggcttacaggtttagagattcagaccattatcatcaaggcaggaagcatggcagcatccaggcaggcatggtgcaggaggagctgagagttctacgtcttcatctgagggcaaacaagaaaagactgatttccagggagctgggaatgattctcaaagcccacctccacagtgacatacttcctccaacaaggacacatctcctaatagtgccactccctgggccatgcatattcaaaccaccacaccaagtgtctgtgatgtgctagaagccccagcatgagaggtttggatctgggagacagaaaaggagatcaggagtatagcctggggatgcatgccatcctcagggatccagccgtgggctagctcctctcttgtacttggtggctgcattgaggttacctggggtggggggggggggtcctgagttctgctccatgctggagcagggtgcacgcaggctcagcagtgactcctgggctcttccttcccccctctgctgccacagaggtaggtctggtgcagtttcacaagccaggcatctttaactactcggccttgctgatgagtgaggacaaagacactctgtatgtaggcgcccgggaagcagtctttgcagtgaatgcgctgaacatctctgagaagcaacatgaggtaggttccatggcctcccatccatgcccctggagacggggctgccttcgctacctctccatccccaggctgcacaggtctggctagtctgatctgtgttgggtagattccgtgtgnnnnnnnnnnnnnnnnnnnnnnnnnnnnnnnnnnnnnnnnnnnnnnnnnnnnnnnnnnnnnnnnnnnnnnnnnnnnnnnnnnnnnnnnnnnnnnnnnnnnnnnnnnnnnnnnnnnnnnnnnnnnnnnnnnnnnnnnnnnnnnnnnnnnnnnnnnnnnnnnnnnnnnnnnnnnnnnnnnnnnnnnnnnnnnnnnnnnnnnnnnnnnnnnnnnnnnnnnnnnnnnnnnnnnnnnnnnnnnnnnnnnnnnnnnnnnnnnnnnnnnnnnnnnnnnnnnnnnnnnnnnnnnnnnnnnnnnnnnnnnnnnnnnnnnnnnnnnnnnnnnnnnnnnnnnnnnnnnnnnnnnnnnnnnnnnnnnnnnnnnnnnnnnnnnnnnnnnnnnnnnnnnnnnnnnnnnnnnnnnnnnnnnnnnnnnnnnnnnnnnnnnnnnnnnnnnnnnnnnnnnnnnnnnnnnnnnnnnnnnnnnnnnnnnnnnnnnnnnnnnnnnnnnnnnnnacacacacacacacacacacacacacacacacacacacacacacacacagcctagaaagataacaaactcccacaagttgtccccacacagccacttacacaccatcacacattcacatctacacataataaagacgtaattgagcacaaggagatggcagcagcatcgtgggggtggggagtaggtagggggaggtggtgaaggggaattgaggtagcttacactaatcactggaaacgtcaaaaaaatgtaatagaaagctttaaggctgataaaaaagaacagatggaagcccccagttttggatagaatttaattgactatactttcattatgtggggctagggggtcataggacgacaaccttgggtgtctttccttgggtgctggccacttttaaaatttcattttttttgagacgtggtctctcaaccagcctggagcttgttaagtagactggcatggcatcactgcctccccagtgcacagtgccacacctagccttttcacatgaattctggggatcgaattcaggtttctgtgcttcctggcaagcacccactgagccattcgttggtctccccagccctctgctgctttgtccgaagttcagggctgtgttatccctgctagactggggatgatggtcccagaacatgaggaagccctaaggatgactctggggtctcagtccctgcctgctccctgaacctcttcctagtctgactttattctggctgcaaaccagtgagctttgagctgtggtgtgccttctgttgctgtctgctttatccagcagttccttggggtgggggtggggggaactgtggtgaactggctctgacacgttcctccctcacaggtatattggaaggtctctgaagacaaaaaatccaagtgtgcagagaaggggaaatcaaagcaggtaattgaccgcacgtacaaagagcccacgcacacagttcgcagttatttggatcttttccagtagcagtcttctgcatgcctacctggtatcacgtgagtctggtgggctcggtcctgctgtctcaaccctaccagcatcaggattggtgctctcaggccagtgccctgcatcctccgcactggagaagcctgttctcacggcttggcattatgactacaggatgttgtttctgctgcccactagtacctggtgtagaattggcctcccctatatgtttctggccttcttgaaccagctgaggcctaagaggtgttggggatttgatgggatttgttattgttgggtttattttttgttgttgttgggttttgtttttttgtgggttgttttttttttttttcctgtattttgttgtcagataccagtatgcgcactcagggagactgagccttgtatcctttttctcaggagctctgagtaccctcttgtgcctgcccacctggtgtcccaccagtgtcccagatgtttttagatcacgaatgtttttagatcacaggagccaggttgtccccaatattggtcatggtggctcagcagtggcagagtttatcagctgttagctgatttcagaaacagggattaaaacaaccactaggagccgggcgtggtggtacacacctttaatcccagcactctggaggcagaggcaggcggatttctgatttcgaggccagcctagtctacagagtgagttccaggacagccagggctacagagagaaaccctgtctcggaaaacaaaaacaaaaaccaaccactaggttaaactttcttggctaaatggtaactgaacactttccccgtcttactggtctctaactgtagtgttcactcaggacccaaggcaggcaggcattacgataggctccctgctgcaggaaatctgtgtagcggagtgagctgatgccttgcaccactggatgtggggacccacagtgaccttggcatggagccctcctgtgataccctgtccatttgagggttgttggggaaaaaagcaacaacaacaacaacaacaacaaaaacccctttcccaacttgagataatttcaggccatagcccatagactctaagtgctgttctcctgaaatagcacatgggctccaaattgccgtctttgttttcccactgggccctcagggatacacagctggctgtactcttgggtccagcctctctctcagttcctgctagtcgctatttctagttctgtgctggtggcaagagtatagggtggggtccccaggaaggtagaaggagcctgtacaatgtctgttttggcaatatgggcccccaaaatgaacggtgtgtgttcagcaagggtaaatacattgccatctgtagtgggctccccagtacaatttgaggtcagctctggtttggtctttgctttgcttggtcaccagatacaggctggccatctacttagggatagagctaaagtcatgcctggcacctgcactgcatgtggaccacagagataaagtttccgttgcagagcctggctcatggtgcagtgtgccccctctatgggcatagacagaccaaacctgagcagaggagagaacaaggcagcaaatgactggcctttaccatgtggatacaagggttctttgatgggtgcctgttaatggggtgtttcccttgcagacggaatgcctaaactacattcgagtactacagccactaagcagcacttccctctatgtgtgtgggaccaatgcgttccagcccacctgtgaccacctggtaagaccacaacatatccctgtgtgaagtgctcacgtaccagcctggctagcgactaaagcagagccagcctgtctcagtcaggctttctattcctgcacaaaacatcatgcatgactaagaagcaagctggggaggaaagggtttactcagcttacacttccacattgctattcatcaccaagggaagtcaggactggaacttaaacaggtcaggaagcaggagctgatgtagaggccatgaaggaatgctgcttactggcttgcttcccctggcttgctcagtttgctttcttatagaaccaagactaccatcccagggatggcaccacccacaatggaccctcccacccttgatcactaactgagaaaatgccttacagctggatctcatggaggcatttcctcaagggaggctcctttctctgtgataactccagcttgtgtcaagttgacatgcaaaaccagacagtacacagcctctcctgttctttctgcaaactgcaaggactaagaactatacagtcggatttctgacagcaacaattgccccgttcctcctgatgagggttctgtgaggtccatgggatgatctatggtagccatgaggtagctgtactttccaaaaagaataaataccgagagatcggtgttagatactgaaacatcaaattggatgtgcaaaacatccagcagaaatcagggcaatctgattaaggaagctggctggggttcccagcagagttctagtcagagcaagaatgtccatttgggtgggacttttaaataaaagaacaaacggcagcagagagatgccgttgccttgggagcatcaggcatccatcaagaactgactggggaagttgaggcagtcagctggagccatctctctgtagctgagatcccatggctgacctcccccgccatccccaccctcactccccaacccccccaccccgccactgtattgtgagataaataacagtaagctcttctgcagatggttcaccccctagatgctctcaagggcacagtgtttctcaagggcacagtgtttctcaagggcacagtgtttttactctggggttgcttgctcttctctctgtcacagagtcagggaccttggaagacactgggaaaacatgcttgggtctgaaatggaggaggggaaaccctgctgccagaaccattttcccccttgagctcacacagcacaagaaagcttaccaatacgatgtatattacaggtcacttacttacttagcccttgctgtgaccaaatacttgataaaataagtagcttaaggggaaaagattatcgaaggcacctcagccaaacagaaggcatcttgtggacaagtaatgctggcctgtaaacacccaggcgcacccccagaaacccgctttcacggtaggtctcacttctacatccaccacctggagagacacccatgagcccatgggtgacattttacaaataaaacgataacaaatatgaaaacgtaatagatgggtttcctctcttctctgctgggcatagatccaaattttgcaccaaatgccaaaaccttggctcttcccaagccttatattgtatacctgatggccacgaggctaggtgttcaaggaaaggtagctagcctgttcaaggaaaggttggtctgctgagcacggggtgagtgatgccatgcagggcagggcagggcagctcaggaggcaggagagtagttcattgctctgctgcagccggctgcagatgactggaatcccgggtgggggaggcttctgaaatgaagagcctcattcacctaaactcagccagctgaagtttaaagcttgttcccagtaagagttcagttagagttgtcttagttagggttgtactgctgtgaacagacaccatgaccaatgcaaggcttacaaaggacaacatttaatcggggctggcttataggttcagaggttcagtccattatcattaaggtaggaacatggcggcagccaggcagtgcctggtgcaggcagagctgagagttctacatcttcatctgaaggctgctagcagaatactggcttccaggcagctaggatgagggtcttatagcccatacccacagtgacacacctactccaacagggccacaccttctaatagtgctactccctgggctgagcatgtacaaaccatcacaagaggcttacctagattgcaagagatgtttggttttgatccccaggaccacaatacactcaccacatgcctatacaccatacatacatacacacacatacatgtaccatacatacaccatacgtacatacacacacacaaactcccctcagttggggatataactagatagaacagactcattagaaattctcttaggcagctaggtatggtgggaaggctcctgagtatgaggtcagcctagcttacaagctcaaaaggaaaaaaaaaagagagagaattaagaaactaaatatttgtatagatgtctgaggagagaggccactgcacaggtttgactggctaaactaactgtgtactgggatacaaccaaaattctagtgtgtgtgtgtgtgtgtgtgtgtgtgtgtgtgtgtgtgtgtgtacacttgataagtgcggtccgtggatcccataggcctttagaagcatttctcctaagaatggggacattttcctgccaactggtttcatcattgcagataaggaagcacagtgattgccagtattccctccgcccctcccacctccccagtatacctccgcccctcccgcctccccagtannnnnnnnnnnnnnnnnnnnnnnnnnnnnnnnnnnnnnnnnnnnnnnnnnnnnnnnnnnnnnnnnnnnnnnnnnnnnnnnnnnnnnnnnnnnnnnnnnnnnnnnnnnnnnnnnnnnnnnnnnnnnnnnnnnnnnnnnnnnnnnnnnnnnnnnnnnnnnnnnnnnnnnnnnnnnnnnnnnnnnnnnnnnnnnnnnnnnnnnnnnnnnnnnnnnnnnnnnnnnnnnnnnnnnnnnnnnnnnnnnnnnnnnnnnnnnnnnnnnnnnnnnnnnnnnnnnnnnnnnnnnnnnnnnnnnnnnnnnnnnnnnnnnnnnnnnnnnnnnnnnnnnnnnnnnnnnnnnnnnnnnnnnnnnnnnnnnnnnnnnnnnnnnnnnnnnnnnnnnnnnnnnnnnnnnnnnnnnnnnnnnnnnnnnncccctcccgcctccccagatcctccgcccctcccacctccccagtatcctccgcccctcccacctccccagtatcctccgcccctcccgcctccccagtatcctctgcccctcccacctccccagtatcctccgcccctccctcttccccatagcttagagcagggcacagccccagtggcctccgggcatccctgggaggtgtgacgacagatgggtcttatcaggtgggtcacactgtcaccccagctcacacttcctaacctgactggtggcctttattgttttaactggcccgttggtcactgcagacactgtgaggtcctgtgtgcttgctggcctctggcttccagccagcagtctctggcacagctaggagctcctgactgtggtgggcagccttgctcctggcctctccagtaagcaaagtgtaaagtgatggcctacttggattgtctcagcagtcctggagttctgataggcagtcctgtgggtggctcctgtccctttaacgggttgcatctgctgatttcttctgtgtgtgtttaaacgcctcttttaaatccagaagtgaaaattcttcaccttcgttctgtgggcattcccccccccccccacacacacacagtttgtcacttgccattgaactgtgtctcattttttcccccacatgagaacattctgattcattatgtggtgatgtttgggtgggtctgattctccttggatggtgttggtttcttgtttagttttttttttttttttttttgtcagcttggcagaagctggacttctctgagaagagggaaccacagttgagagaataacacctcataagataagataggtctgtagtcaagtgtctaggggcatttcacattagtggttgatgtgggaagagccagcccacggaggggtgtataagaaagcaggctgagcaagccacgatgagcaaaccagtgagcagcattcctccatggcctctgcctcagttcctgactctagactgctgctgctttgagttcctggcctgccttccctcattggtggactgtaaactgtgagctgaagtaaaggcggccatttatcacaacaataagagagctaagacacgtgaaataggtttccttgtcaggtggaaagaggttatcccaagattgtgttacctgctgaccctcatgagcacactgtgccagaagcatggacaaacacatttgttgtgtcctcgcacagtgccagaatttattcagcaacaataaattcccaacgattagcagtttagtaacatcaggttatcacttaatcctgcttccctcagtgatcaggccgagcaaggcaaatgcagattctttattcccgtctttttgtttgtttgataaccatatttctctgtgtagccctggctgtcctggaacttactttgtagaccagactggcctcagactcagagatctgcctcccaagtgctgagatttaaagcgttcgacaccatgccctgctcttacctgaatcttaattagtaacgttaactgtccaaccacacagcacagagaaaatatgtgtatatggcatgtatatggttatagagggaatacaggttaaagtcgcttgaggtttcagacctgggctcagagaatctgcactgatttcaaaccagaccagtgctgcgagggagccgctgcagtcaggtgttagagagctagacacctccgagaagctggaagctagagtctcccaaggcagaagcatgtctctgctgaacaaaccaggtagcaactgatagtttcgtgtggggctgtccatcatagtgttgggtgtctatcactttaaggagacaaggtgaggatgttacacctaggtctattaattcgtaggcctggcttcctaggcctttttcgtacaactgtgtgccctgacacactcagcttgtatgaattcatccaatggtggctcccctttctgttcccaggagtaaaccgtttatccatctgtttggagtggatggtgcatggcagacagtgtagcttgcaggtccacccagggcctactcatccttttccccaaagtggaatcaaaagctgcttgtaaaacagactctcctaaggcaaggcacagcctggagaccgttttatacaatatggggcagcttagagccaggcacagcctgatcccggcatgacctgtgttgtggtgagcttgctttagtagaatggcttcttcaggagctgctggtggtggatgagcgggggtgagggttctgtgggttgttttcattgggtttgtgtcgcctgttttgtgaggactgtagttgagcaagcaacaactgaccctgcatatctcaggctgtcacacacatgagatgtccttcagctgtcaacggtcccagggtgggacccacatggatcagggcccacttaccccacactctggtcttctgaagtgaaagaatctgtacctttaagtgatacagggacaggtcctcagcaccgagaggtcagatgttttctttttattccattgtagaacttgacatccttcaagtttctggggaaaagtgaagatggcaaaggaagatgccccttcgaccccgcccacagctacacatcagtcatggttggtgagtcctgcgtctgaggctctttcactctctgagtttatggtggcatgtgatgttgccacctgggacactcaggtcttccctcttcagccctgccttccttggcatcatcttggcacgagctcccttcagagaaggtgagcgacttgtggcacagactcctcagtgagagctttcgcgtttcccattcagagggagactcaggccccaccctctgcagcagcatatggcttctggctgtcggtttttgtgcagcacacaacctggatacttgtgtggctctgtgcctcccgctgcggtcctgcatatctgaggctaggggtcacacgctgtcttacagatagttcatgttggaatctctcagccagtgtgaaggttcaagcttcactgtcaatgtataacattcagtgaactgtgagatagttaatactatattacaaaacaggcgtcatgtgtgacactcctgcgcagtcataggctaaagtatgggttctgagtatattaaagtagacgaggctggaccatgctgcctggcagtgtaggtgcctgcacatctttttttacttacagtgctttttacttaggatggcttccctgggtgtcaaatactgaggagtgtacttgccattgctatactgactgtggcaaattctcatttgtgattagctattaccctttaacctgggaaaaaacagttaaatttggtgactgattgttctgatgaaagatgctgatgtaggaagcaggaatgcatgtcagagaagacgaggacccccccccccccgccatcctataaggaattaatgagggtataaatgaattatggtagcctggtatgggtgtgatagcctagcagaggtggaactatgaggcttgcttacagtccagcctgggctaatgtcagaacttgtgttaaacagttgtccctagtctctgacagaggctgaagctctgattggatcttctctactccctctcctccaccacagggggcgagctctactctgggacgtcctataatttcttgggcagtgaacccatcatctctcgaaactcttcccacagtcccttgaggacggagtatgccatcccgtggctgaacggtaagtgtgtgctgccagccttgtgggtctaccattttattcttcctctagctgtccccaggtcacaggagccgggggaggcgggggtggggtgggggtggggtgnnnnnnnnnnnnnnnnnnnnnnnnnnnnnnnnnnnnnnnnnnnnnnnnnnnnnnnnatgtcagatcctaggcagtgctctttggaactgctcaaggcccgcaccagagtagctgtcttgctcactgctaatagcattgtttaaatctgattctctgacataccccacccagccccacttccaccccgtcccccaaatgcagtttgggagactttaataaaatgaagctctaatgggaagttgagaatgtagacactgagtttgggtgtcatcttagatgtggagactcttgggtctggccgggtggtgttgaaatgtgtctttactcccagacaagcatatcagggtgtggatgatgggggccctttgtgggtgtcttttttgtggggatgctgaccagtgatgcagggctttttcgaagccccttgatctggagtcagaccctggagtctgagatctgagacagccaatttctccttgggcctccccaggagtctggaaatccttcgggtggctgatttggcccttgtttaaattggcagatactctagcatgccagaccaaccaccagcagagaggcctcacccggcttcctctgtggctatcttggtgaagctgaggagggtggcgggcgtcctctgggcctggagttcacagtgtggcatacatactgtagacgtcctagaagggaagcttccaggctctaaggctgcccttgccagcctgcagcaccccagggagcaggtagagaggtggcttggtagctccgtgtacagaaaccatcctgtgatgccaccccacagagcctagcttcgtctttgctgacgtgatccagaaaagcccagatggtccggagggtgaagatgacaaggtctacttcttttttacggaggtatccgtggagtacgaattcgtcttcaagttgatgatcccgcgagttgccagggtgtgcaaggtgggtgctgtctccctgttcccacccacagtcctgcatgatgccactccaagattcctctctggaagtgtggccatctcctatgggtagagacccctgcggcaaagtttaatgtacagttgaggcacagtaagagaccagcaataagagttttagaggtatgtgcatggtttctcttgagacccaaagtaggattgggaagatggcttagtggttaaaatgcttaccacggaaacaaaaggaccagcgttcagatctccagaacctatagatgctgagcggatcctctgtagaaaagtggagatagggcctgctagtggggctgtcctcatcggcaagctctgagtttgattatgagaccttgcctcaaagaataaggtggatggttcctgacatcaacttctggcctccagatgcacccacacacgaacactcatatagagacacaccgcacatacacacatacatgaaaggaaagaaactcaaagaggaaaaaattagtcagagtgagcacttgtgatattttcagtgtgtcactaatcacaggtaactgaaattgcagaaaatgcaatcacgcacacgggagccgccttatttctttccagcccagagtggagtatagtttgtaactgtctgtgttgtctcagtcgtcagctccctgaaaatgactaggattgagcaggcaaagagggcacaaaaggagctcttagtggatgatcatgtgtttgccctaggatggtctgcggggccagggtctgtggtgggaaggaggcctcccatcacttgtttaactcctgggtcacagctgggaatgctgcaggagccaaagccagtggcacgctgatgtgacacagatggggtggttttgcttgtcattgaatgtgtttggctcttttcgtattctgtgatcctgtcccacatggaagtattgctttggttacataacttgtcttcagtattcttgggctaggccgtggttggggacatatggacgcctgcttctgtggctagtcatctgtcctgcctctaccatgtgctgtctctggaattccagggcgaccagggcggcctgcggactttgcaaaaaaagtggacctccttcctaaaggccaggctgatctgctccaagccagacagtggcctggtcttcaacatacttcaggatgtgtttgtgctgagggccccgggcctcaaggagcctgtgttctatgcggtcttcaccccacagctgtgagttcacttgtgagtcccttggcagttggggcctggtcaccctgacgacctcctgccctcctgacactctcacggattcccctccacaggaacaatgtgggtctgtcagcggtgtgcgcctacacactggccacggtggaggcagtcttctcccgtggaaagtacatgcagagtgccacagtggagcagtctcacaccaagtgggtgcgctacaatggcccagtgcccactccccgacctggagcggtaagcagggtctcgagctctggggagggctcatcttctctggatctcaaggccccccaagcatgagaccacacagatcctagtgcatcccggcagagggttgcatggcaacaggaatctgggtgctgggctgagtagctgccgggcctggggtgaacagtgaagctgttcctttctgatctcctctgtgttgggtagcaggcctcactgcatgctgcccggacgagagagtctaccgccgggctcctttgagaagtggacattgcacaatggcaggcttgcttcatttcccatttcctgcagacaaaaaaaacctgtttgtcagcctgggctgtctcctgaggcagcctgtccactagataacaggaatcatattctttcctcctagatacagtaaattagtaaagaaaattctagggttgcctgcatattgttgccacgtggtggatgggtgtgggtatggaggggcttggctcttgaagctctcccaggatggactgttctgtgagtgtctggcctcgacacctggttattctcataactcataattcaggtgttcagtaaaacatggctagggagctgggaccaaaaaaaaaaaactctttacaacttttttttcttttgtgctacccagaatctggctttctctcctctctctcctctctctctctctctctctctctctctttctctctctctctctctctctctctctctctctctctctctctctctctctctctctcttctctctgtgtgtgtgtgtctgtataacaatatttaacaagcttcctttggcatactttcttctcatagaaaagctgtgaaatgagtgctttttaatctggaagtttgctaagttttttcattggctactaattcctctactgatcctgagacaattatgtcccgtggctttaaaagcacagctctttgtctctggggaggtcaccttagcccctgttactctttggagaagtgtgaccatggccctccagggcttctcttctgtgtgctcagttgaagctaagtgggcatgtgaccgcggtgcttttaccccacagtgtatcgacagtgaggcccgggcagccaactacaccagctccttgaatctcccagacaaaacactgcagtttgtaaaagaccaccctttgatggatgactcagtgaccccgatagacaacagacccaagctgatcaaaaaagatgtaaactacacccagatagtggtagacaggacccaggccctggatgggactttctacgacgtcatgttcatcagcacaggtgggttccttggtaagattgggaaattcacttttagccatctataggtaggtttggtctctccaggtaccaggaaggtttgtgacagcagaaaaggatttctgaggtatcacagcacctgggattatgagtctctgtggccatcaggcacctggggcactggttactaatgcaagtcccaacctgtcgtacctgggctggagtggagttaaatagtccctgttgtcatgggactagtgggactggcctggtatttcctaattggtagtgggagactctgccccctcctaggtaggagccaggttctgtcctgccccgagctgcctttggagatgcaactctctctcagatgtcttctgggatggggatggaaagttggagcatggcagctgccagagccccaggggctacccttagagcttcccagatgacttgaacattttgccctcgtctgcctgcctgggcccctaacctcccctggaagaccagtaaagtgcaacggccaccttatactgaatgtggctcaggtgtcagggtgtaaccttgttggtgaaggtcattggaatccaccataggacagggttgtcctcttctgagtgccccattgaggggatggcttgagttatccacgagtgtgagtggttgccgccaaggctggagtctctctcctagtttcatttctgttgccgggcgtggtggcgcacacctttaatcccagcactcgggaggcagaggcaggtggatttctgagttcgaggccagcctggtctacaaagtaagttccaggacagccagggctacacagagaaaccctgtcttgaaaaaacaaaaacaaaaacaaaaacaaaaaaattaaccagggtgccaccctgggcctgtccctctagggcctccttgctcacctgtgttctgaccttgcagaccggggagctctgcataaagcagtcatcctcacaaaagaggtgcatgtcatcgaggagacccaactcttccgggactctgaaccggtcctaactctgctgctatcgtcaaagaaggtaatgtgggtttggttggttggttggttggttttaggggtgggggtcaggtccaggcgcttgtctcccttgtagcttctctgtggctaggactggctaggatgggtctctcaaggcttggcagcctctggcccaggtgaacttggcgtacacagcatgggatctgaggcttgggaggaggcatgggagagccaggggccttgattgtactaagccactggagcttttgggaggtccctaacctggggaaatgtctgtgccttgaacctgaaaaaaaaatgcagattgtgctggtgggacatgacattttgctaatttgtaaggagaaataacaggggctggtgagatggctcaatggttaagagcattgactgctcctccagaggtcctgagttcaaatcccagcaaccacatggtggctcataaccatctgtaatgagatctgatgccctcttctggtgtgtctgaaaacaactacagtgtacttacatgtaataaataaataaatcttttttaaaaaaaaaaaaagagaactaacaggtcaccctctagagctcctgccataccgccctgtgcatcgggcagcctttgcagaggcctcagtcacgggggctcagctctgcactgtggctcccacgagccacggaaacacatagatgaccaaacctgccctcgaagccatgctatgtattgcccgaagttttcataaaaagctccagccagatggtagtagtgcaaacctttgatcctggcactcgggaggtggaggcaggtagatctttgtgagttcaaggccagcctggtatacatagtgtgtttcagggcagccagaactatgtagggagaccctgtctcaaaaatgaatgaatgaatgaatgaatgaatgaatgaatgaataggtattttttaagcccctaagtggggtgcagtatggttcatacctctagttccagaccttagaacattggaagcaggaagatcaggagttcaaggctagtcttagccatatagcaaagtcaaggccagcctgagctaagtgagaccccattgcaaaaaataaaacaaggtatataggagtgaatagaaatggcctgggtggggctggagagatggctcagtggttaagagcagtgactgctcttccaaaggtcctgagttcaattcccagcaaccattgtggctcacaaccatctggaatggcatctctgatggatgccctgttcaggtgtatctgaagacagcgacagtgtactctataaataaaataagtcttaaaaaaaaaaaaaagcctggcagtgatggtggcacatgcctttaatcccagcacttgggaggcagaggcagacaggtttctgagttcaaggccaacctggtctacagagtgagttccagggcagccagggctacacagagaaaccctgtctcaaaaaaccaaaatgaaaaaaagaaaagaaatggcctgggagctgggcttggtccactggctggaacttgttccttgtcctctggccttgggaagatgtggacaccacattttacatctaggataaaacaaggaagttcagaacatgggttgtctccaaatcctgactacactgcctgctgtcatgttaccctgggcatcactatatggtcctcttaaggtggtctctgtgtgtgtatgcttttcattaatgtgactgttaagaggacatgtgagcctcctaagtgctgagggctggctttgagcagcacagaacccagggaaagctaggagcaggatcagctgccacctgccctgcttcatgcctgctggccaaaggtgctcccctccccttgctagggctctgctgtacccccctgagaagatgggtccagggccacacttttggcttcaagtgccagtgctagcctcttgcctctacccttgtctctgatgcctggctctgggacactgctgaactgtggcctggtgtgactgtccccgtggactgcacatctgtgggccctgtgtttccaattcagttctctttaagtagctggccacagcagttaccaagggtccatcagtctcacttacccgtgtgctgggcttctgctagcaccaggtacaatgctggtcctggcttgcacccaggaacatggcacgctcctgtcctggaagtcagagcgatgttgataggcgtggtcacattggcaggctggattcagagatgactgataaggatgtgtccttatcacaggtacctactgtctggctcaagacaagactggcatttaaaggttgtgccctgtggattccagctgtagtgctgtgtcacttacagagtccaggagagcagtggggggggggggggtcacattaggagtgggaagcaactggagagggcttttatgtggttttctcaagacacaaatgaaagtctcttcacccaagatagagcaccaaggatagaccagtcgagctcagtgagccagtgagttttggggaggtagctacagggaagaaggaacaggggattatttacaagcccgtgggtggttcggaggcagctgcatccatatatctcccttcacagctggtaggcagctcggcagggcagagtctcctctctaccgcaattgtgtgctgcttatataaccttggggcagcgggcacttgtgaatcttaaacctcgtcaggcttcctaaatttccttcactttgagtcttgtgaggctccctcggcgctccgggaggacgtgtttcgattgggcagacatagaaacagagctgtctcttctgggaagaggagctgctttgggcgtgcagtgtgcttagcccagctacggaagggtggcgtcagatcccaggccctgcagttcctccactggcgtttgaatcctcctgggacaggggacaccctgcttttccaaacaagatttgtgtcttaatgtgcttttctgtcactgcgataaaccactctgaccaaaagcagcttgcaggaggagaaaatttccttcggttcacacttccaggttgtagtcgttgagggaagccagggcagaagctgaagctgaagcagagactgcggcnnnnnnnnnnnnnnnnnnnnnnnnnnnnnnnnnnngggggggggggcggaatgggattattaagcttgcccgctggcttctgcttagctgctatcttataaagtcaggggtggcatcactcacactgggttgcacccaccctaattacttagcaaataagaaaatggcccacaggctgggcggtggtggcgcacgcttttaatcccagcacttgggagggagaggcaggaggccagcctggtctacagagtaagttccaggacaaccagggctacacagaaaccttgtctcagaaaagaaaaaagaaaaaaaaagaagaagaaaatgtcccacggacatgtccacaggctaatctgatataggcagttcctcagctgcagttgtctgccccgcaagtgtggcaaggtgacaatgaaaacccatcaggacactgtcatttaggtcttagcggtcgggccttgtggcctattctgagtcagtgagtccttccctccatgcagtgtttgactgtgctgtcttcccaggagctggtggagaagctagcagcccctcccagtgcctgagtcctccttacacttgccatccgtctctcatacacaggggaggaagtttgtctatgcaggctccaactctggagtggtccaagcgcccctggcattctgcgaaaagcacggtagctgtgaagactgtgtgttagcacgggacccctactgtgcctggagcccagccatcaaggcctgtgttaccctgcaccaggaagaggcctccagcaggtatgcctaaggatggggctgtgtgcctatgccccatgcacaagccatagagtaatgtgcgcctgctgtcttctaggggctggattcaggacatgagcggtgacacatcctcatgcctgggtgagtggatctcctttgcttcccacccctgggctggcaaagctcccggggcgtcagttccatggttttcctgtgcggtctgtcttcctttctcctctctgaacagaagtcaagtgtcacgcagcagacctgtgacctctccttgtggtgaacctgtgatctttctctgtccctttggttacagaaagagggctcaaaggcacacagggtgtatcggttcactggaaagcacaccctggcccacaccatgctcctctgttctgcttagctgggccccgtaaacaaaactggagcctgctaggaatgagagcgaaggagcccttgggtatgaccagatagccctagcctaaaaacaatactcaggaacagtgtgggacagtgtcatgcttcaagatgaaaatcctaccctagaaagaagtgccttaaacgctaaggagatggctcagttggtaggatctgagttcgatccccagaacccatgtaacagctgggcattggtggttcatgcttgtgatcctagccccaaggagggtgaggcaggtggatccctggagcttgctagcctcacacagcctagccgacttggcaagtaccagacaaatgagagactccatcacagaaaaagacaaagagggtaactgctatctgaggatgatactcagatttctggcctctttctatataaacacacatgtacgtacacacacacacacacacacacacacacacacacacagagcaaatggcatcagattgccttcaggcatgtgtaaatgtcacacaaatttcatgtgtagctttcagtccccttccaaagatagttgtctcgttttatatatgcaaatatttccaagcccaaagcatttttcatcttccgtatttcagacaaaagacacagttgtggttagttctggtgtcctcttggggcaccccctcctgatggctggccatcaggaaacggctgtgaccagaggtaggcatagaatcttgccagaattctagtctgccttcccagccccgtacccccttctctgactagccacatcagagtaagaagagggtccctggttgctagctggcctgctttagccattagcagaagtatttgtcagctgactgggtgccactgtgagggagctgagccgtgcccagccccttcctcagcctgctgacctttctccagggccagggtgagaacagaaattctcagagctgtcgccagttccttcagtgtatggaagggggacggggtgggggctgctctagggtcatggatgtctttaccttggtcctgaagattgcacctggctccagtgggtggaagtctcatgccgtcctgtgggtattaacctgttttttgaaagcagtcgagcggtcagacggagttgttgacggtgagcacgtttattttgatgttccagataagagtaaagaaagtttcaaccagcattttttcaagcacggcggcacagcggaactcaaatgtttccaaaagtccaacctagcccgggtggtatggaagttccagaatggcgagttgaaggccgcaagtcccaagtacggctttgtgggcaggaagcacctgctcatcttcaacctgtcggacggagacagcggcgtgtaccagtgcctgtcagaggaaagggtgaggaataaaacggtctcccagctgctggccaagcacgttctggaagtgaagatggtacctcggacccccccctcacctacctcagaggatgctcagacagaaggtagtaagatcacatccaaaatgccggttgcatctacccaggggtcctctccccctaccccggctctgtgggcaacctcccccagagccgccaccctacctcccaagtcctcctccggcacatcctgtgaaccaaagatggtcatcaacacggtcccccagctccactcagagaagacggtgtatctcaagtccagtgacaaccgcctgctcatgtctctcctcctcttcatctttgtcctcttcctctgcctcttttcctacaactgctacaagggctacctgcccggacagtgcttaaaattccgctcagccctgctgcttggaaagaaaacacccaagtcagacttctctgacctggagcagagtgtgaaggagacactggtcgagcctgggagcttctcccagcagaacggcgaccaccccaagccagccctggatacgggctatgaaacggagcaggacaccatcaccagcaaagtccccacggatcgtgaggactcgcaacggatcgatgaactctctgcccgggacaaaccgtttgatgtcaagtgtgaactgaagtttgcagattcggatgctgacggggactgaggccagcgtgtcccagcccatgcccctctgtcttcgtggagagtgttgtgttgagcccattcagtagccgagtcttgtcactctgtgccagcctcagtcctgtgtccctttttctcttgggttgagcctgtggctcatcccctttgtccttttgggaagcaagtatctattccagtctcaagtcctgcagttgctggagcgcttacgcacctgagccctttgtgtcctgggggagagatggccacctccgtgggctgcgaagagccaccccttcctcttccgattctcctagcagccactcagagataatttaattccagattggaaacgcccttttagtttatcagattggtaacttacatcctgctgcccagatggcacggacagttttctttcacttaattattattttttttttaaggattttcgctcctattgtgttgatgtcttaggtcattttctttttttctttctctttttttattaccagaggagatgttttaatattcatgagaagaggaacattttctagatttttttgttgttatatattgagatataaaatatggctatgttgcttaagattctcagggatagacttatttttgttaacttcattctttcctgctgttaggaacataggcctaaaattgtctcttgagtttgctcacccttttgttttggtagggtttttttgttgttgctgttattgtttctagtttttaatcttattcattttgaaggatttttctttctgaactttttaaatttttatattttcctgccatacatctacaaagtgggttttgagtgagggcaggtggcccagtggctttgggtggcgactgagctggtcccacgaggggaggagggtttatataccccatgaccctgcggcttcttggcgcctcctgcccatgaggatcacatcctgtctctccttgcttccatctctcatcactgcccttggacttccgccttgactgtccatgaaagacagaaatgggttgggtagttgggctcccaacctcggatggtgaccgcaacatcccgtgtgggcggccggccgctcctgcagcccgactctcctgccagtgtctttcaggatgtcaacgggtggtacgattctggcatttgtttctcgctcaccgtgtgtggaacactcattccatgtagagggtgacgaactctggattcccccccacccccaccccgtgccgtgtagacactcatcttctgcatgacatgatctaccattcggtgtaaacatttgtgtttataagatttactttgtttttatttttctacttggaactgtacacatttgaaaagtacccaaataaaccagaagctttatcgttgactgggccagcctttgccttagtgtggaggctgggggcggtggggtgtcctcctgtccctctgtgacggccctgggtgggggttggtcctgggatcttgtctgttctcatcccatgtgtccggtttcttgctttaccttctccgtcatgggaatggttctgacgacttcttcctcagtgccttcttttgtgtcctctgtctcacagcctcatctcctaagtccttccctcctcctggctcctctctatcctgtctgggccctgactcatcttctcccagaagccctcggccggccttggcctcggggcccaacagccgtaagcaggtcaccttactgccacccttcttgagtgaccaggcgcagaaggtgcaggcgctggggaccttctacctcttctgccaggccacaggtgagttgaggggcctgagtgtccatggctgtcccctcgctctgcccttgctcctagctgtgcctgaggttcagctgtctgtgctgatcccgggatcaactgtcaaccgtgcaacgctgttgctagggctgccgaaggggtcatccagcctctcgccgtaaaggtacaggtgttgggtcttctgagcatgtaggctgctgtgcccaatgttgtatgtcagaaaactggacctacagggcagcagagaaccagatgaggccacgatttgctaacctgggttaggtagggaattcaaggccaaccccaggcaacttatgagaaccctgtcttggagttttaaaataggaattaggatacatccagtggtagaatgtgtgactaatgtgtacaaggtcccagccacagcataaataaatacataaatgcgtgaagtccataaggtggaggttttctccctctgctggagactatcacataaggacatggactcttgaaagatggtagtttacccaaaccattctttagctcagagatacccatagccccatctttccctgtgggctttggcctctgcacagaagtgaggaatagagttgatttcaagacaaagcaaatccggtttatcttaaaattgctttttaattgtcgaagctatggagatcttgaaagtgctatgtgttttgttaaattagctctaggatcccaggggcctgtgttgtctgctgtgaatgcaacatgccgttggcagctggaggccccgtggaggctgtgggaggtgggcagaggttgctgcagacctacgtaccctgacatgtcatcagtgaatacatgggccttgatggcccttttgagttgctgtcttaactctggctgcccaggctgctgaccctggacacctgagcttcagcccccctctccaggtccctgggtctcctggtgtgtgtcacggtgcccagtgattcccattttgtgcttgctgctgtggaccaagccttcatgtcgacacctgttcttgttcctcagtaagatattttaagatagatcatttatttatgcatgtgtacaaatctgtgagcgtataaaggggcagaagagacgccttgaagccagagtcacacatgattgtacatcacctggtgtagatgctgaggactgaacttgggttcaacttggaacctgcgagagaagcaggtgctctcaactgctgagccatctcagcacgtctctaaggggcaagccattacatttaggggagtgttttccagtccccggtattattagcaaggctttcacaggtatgggtcctccggtgtgggagagggtgaatgactggggccttccttaaggaagataagacttcattgttagatgcatagaaactacaacatcgggcatttcaacaagggggaattcgaagccgggagttgtttgctaaggtgatggggaacctaggagtgagacaggaaggtgggcttctccaaagactgctacaggaagccaccagcatgggcagaagcaaaataaaacctcactcacacttgccaggcctctgaggttgggcatgacctgcaagggtagccttgccggcaatgttcctaccgccgcactcctcaggtaccacgagagacaggagatgcgctttttgaactttttagtgacctaagggaacactggaagccagggactgaggagccatggctggggactgtgggggccggaagtgtgcagggtgtgagtggaaactgaagtggaagagtgagttcctctcatgcccctcagagcggactgagcccaggctggggagacagctcactgattaaagtccttactgtgggagtgtaaggactggggttctcatccccagacccccacctaagtgctgggtaggcttggtgacccacctgtaattccatctttagaaagtggtgatggaatccccagagcatgctagctggcaggatgagccatttagcagtgctctgggtttgattgacagaacctgtcacctcaagcctttgcatgcatctacacacacacacacacacacacgcacgcacgcacgcacgcacgcacgcacgcacgcacgcacgcaccaagtctctgtcttgagcagacatgggaccaaacccttactctcccttacctactttctcctgtccttttttccacaaacatttgaccacacccggggcctgtcttttcagtcctgtcctccaccaagacaaggcactttagggaaaggcaccgccagcctggtgatggctgggtgggctttggtggtgtgaacatgccagggcctctgctatctttgagcaggtggcaggttgggtcggagttggcagacaatcttatctgaagcagaggccatgtggttttgaactcaactccctgtaacctttctacaaaaagcagtgtatgtctttgaggtctgctgaggaggccaaagcagctgtcccaggtgagaccccagttggctctcctagcccaatgacatgggcagggcagggctaggtgggcagagcaagttgggagccttgacctgcgtttttctctctcctaaaacagctgtttgtatgatttatgtgagtggcttggggctagctgattaaaggcctagtgcgctgtttttagaacacaagacttaaagagagggtgaacagggactcttcagtcccttggcatgtgtcctggtgtccgctctggctctgctggtgactctgagctatcttgggggagcctcacccctctagagggttgattagaggtcagatagacagcaaggcttgtactcaggactattctgcccactcctgcttccacccaggacctccatgtcctctggattggatgagtgttttcccagtgtatgaggcaattcagacgccctgttctgcatacccaagtgagatgaccagggaagacatgaaagctgccccaagcatggctgtgggggaaggtcaggctgcctacagcctaaagcttgcaggaactcccgtttagttccaggnnnnnnnnnnnnnnnnnnnntttgtgcccgggtctgcagcccagcactgaggtccggccatacccagccaggtgggtggagggctggaagccgctgcactgtctgaccttacactgcagttgcttccccgtgtgctgatatcactgggaggtgcatgtttattctgtcctgctgccagctgccaaaggttggcatatgtacagcacatgccatgccaacacacaccacactgtgacatacactacaccacaccacacataccacatataccaggcaccacacataactcccaccacatactctccacacatagcccccaacaccacacatataattacccactgcacacacaacacatttatcccacatttcacataacccccagtaccacatgccacacgtaccacatcttacatgccacacaccatgcaccacatatcacaccatacatgcttcctttgtgtaccacatatataacatcacacataccacatacacactccataccatatatcatgctacacatacatgtacacactacgtactcagtccataaacactgcacacatcacacaaaccccatgtgtagcacacagccacaccaccaccacatctcacctataccaaatacctacatcacaagtcacccacactacaaattgcccacaccgtaaaagtaccacccaatgccatgtgcgcacaaaccctacaaacttaagacacttacctcaggtgctttacgaacagcataagcaaattgcttttaccaagcggggttcctaagcaagcacctgtacatttttgggtcccctcatttagtccctgtttggggtatggattcggggggccctaagagagctgaggaattggggtagtggggacaatgaaagctgcttcctttccgggcctcctgggttctgggcagcttcaggatctgggctcaaagaaacttttggggctcctttctcctaatgggggcctctgtggtggccaggtgggtggggctgggaaaagggagtccctggtacctccctttctcaaggagggcaggggcacaccagaaagtggtttcccatatccatgacctttaagagtgtcctcaaccattggggcacttcctcattctggttcttcagggggtgggtgtgttaaagatcacatgacccttatagtgagatgcagaactgggtggggtgtgcctagggttcctgctgctccaatttaggaatccatcataaatgcagacaatgatgtcttgagagcatcagcctcatccttgagcagtatctttagtccccccagagtccagagcccagctccctcattcccagggcctgtttcagttcacagtcctaagaagccactgatggctacatcgtcatctctcaagacttccaggtgcagtcccgattacctgcatgatgaggtgcctgggggcagagacagagaaagggcctcaagcttagcctcccctcacaggtaacagacatgcttgtacttggtctaaattccaggctggccagggccaaataagatgccatctgaactagcagctgtctggactaatggcatgtgactgatgggggaactcatgaaatctgaggctacggtatgagagaagtttctagaagttgagggaagctttgaaagagcccttgtggccagagtgcagacttgtggggactgtgcagcccatggggataggtgggtcagaatccttcccaggaggcttagtagtcactaacttgatgtcaggaagagcccagcccgtgtgcatgactaaatacctgacaaaagcgagtcaaggggaggttttaattatggttcacagtctgagtctatgaggaatgcagcaggggcatgcacctatagtcaggaagcagtgttgctcagtttgtgtttcaacatcccctcctctgggggcatcactgtgtagccttggctggcctggaattttctagactaccacgtcttccagttcccagaaatcctcctgactctgcttcctgaatgctaggattaacggtgtgtgccagccaccatggccaacctcacaggcatgcctagaggcacatctcctaggtgattttagagtgtcttgagctgacaatatctaccatcacatgaaggtatttgaggcaggtggcacaagacagaaacaactgttagcttcagtgaacccctagctaggacatgggtgaaagaactctgggaaacctgtggatgggacgtgcctgggcaactgtgatgcataggtccagttctgggtccgccacccagtgccagatggcacagtactgagggggtggcaccgtccactgcttttaatgctccttctccctctctttgatttctgcactcagaaggaattggatagttaaagaaccaacagagagtaagtacctcttcacctctctcatgttttacagtgatgccacatttaagtttacaggtgctgtggtgtggggtttgtggccaatgtgacctacatgttttcaccccccaccacaaacttgatctacaaacaaacaacaaaagcccggagttagtgtttcatgttcattccttggttgtaatacctcaagagttagttgttccagttggattgtagattgatacccaactgcagaggaatggctaaaacaatatggttccatgaaaggcactgagttgcaaaggaaatgcttggccctaagatctacaggtaacacccaagatcctaccagctctgaatccaaatccacaaagctgctcctgtcctggatctacacaggctctgttgtgtcattgttccttaaactgtttcacagctgtttaagtagtgtcggcatagtattaagtactgtaagaaatgtagaaatgattccaagtctccaggaggaggtacatgtaggttttctgcaaacatgtcatttgatgtcctcagggatcccctgcagatactaagggatgactccagttgtgctccccagttgatggacatctgtatacagatgtgtgtgcgtgcatgtggatgcgttcatatacacctaaatacatggagttgtcggcggctagaattgaaaacacttgagtagaaagcaaatttaagtccgcagggcttgtccactagtctgcagccaggtgggtaggcacaggtgcttccggaacacgagactggcatgttcctgtcttatgtatgtttgtttactttttaattttttaagttaatttattttagagacagaaccttagcatggatctctggctagcctggagttatgagacttactctatagctcaggttggccttgaacttatggtggttaaccctctgtctctgcctgctgagtaccgggactacaggtgtgcttcatcgtgcccactcaattctgtctcagtggcatttttcaattataaaagtaacacttatttatatttgttattcataagctcttggaaatttatttttaaaaattcaagggtctggagagatgcatgggtagttaagagcacttgttcttggaaaggacatgggtttgattcccagcacccgaattgtggctcaggatccctgcagctccagttccagagcatgccatgctgcctcctcatgcaggtggtgcattggtaacaagccagcaaaacacccatacacatacaataaaacccatccccaggctgggaggtattttagtggacaaagcacatgctgtgcggcatgtacgtaatgcctggcaggcagttgcagtagcctacctataatcccagcactcccaaggtgggaaagggagatccttggagcatgctggctagccagtctggctgattcaatgagctcatagtatacttgagaccctgcttcaatatatatatatatacacagtgccaagcaataggcgaagacacatggttgacatccatctccaagccccacatgtatgagttgcattctgttaaccctctggagcctcaccaagcactgtatgacctacatgtttttcagtttgcttttttctgaaatcagtttctctgagagggttctcctgactgtcagtcactgtagtggcttcctaccatttgtatgtgtcgtcgtcgtccccacccccgccccccggacatttcctgattgttactaacagaaacaagcctgtggccctccagttgcattaccgctttggagccgtccctgggatggtccagttgtatttctacttgatccagtgtgagaggaaagcctgggacaacagcacagggggtcattgatgagggaaccagatgatgatgaatagagggttggtgaagtgaggagactccaggcccaaagttataaactaaaaatctcttcaaaagtccagtctgtggggctggcatgctgttggtagaatggtcacttagtatgcatgaagtcctaggttagatcctcagtactccatcaacttgttcaggggtgcaggcctagaaccccagcacgtgggaggtgaaggcaggaggatcacaagcgcaaggtcatctttggctacataaagttcaaggatagcttgggctacactgaggtcctgtcttagaaaagaaaaaatgcaacctgtcacctgtaactgagtagtgctaactccctgcctggtaccattccttccccagggcaagttctcccacccttggccacccacacaccctggcatcatggcggggacaatgccaggtgattttaagagttcccaggttctgccttggtggttgttatttgttgttattttttgttgtttttcctgctcagtgttttgagcccaggtggagattgctatttcttttctccccgtttgaatgtctcccatcaagcgtgcgtgtgtgcgtgtgtgtgtgtgtgtagatggcatgtgaaggtggcaggacctggctggctggtccttcctgtccagctcagcttggtacatcacatacctggtaacagtagctgacaaaatgtagcaccacgaggctggtttaaaccattgggccatcttcagccaagccccaggtagggccagggagtgaaccatttatgagtgtagctgctttgttttgccttctccttggtggatggagggcagcctgcccttgcatggcctgaagctctggggatctagggtgaagtctgagacccagactatacatacccataagtcagcactaacagggaagtgacctgttgccatcacagctggttttggcactgtgaccagaactgaacctttctttatgattccctagaaatgacaaccctcagacactctataaggaatcaagggtctgaggttagcccagcctcttgctggcttgcagtgtgtgtgtgtgtgtgtgtgtgtgtgtgtgtgtgtgtgtgtgtgtgtgtgtgtggagggtgggggtattctgttttgggtcacagaccttctcttctattggatgccctgccttacccgcttgccaagaccttgtgtgtcagacaagttgaagtcacccatggtgcccccttggatggggtgtgatggtaatactttgaacagtgtggtagaaacaggtagccttagtcttgaagacagtctcattatgtagagagacctctctcttgaactcacagaaatccacctgcctctgcctcctgagtgttggtattaaaggtgtgtgccaccacacttggctagtctttatcttttcaataattactgttttaaaaaagaaaaaacaagggctggtgagatggctcagtgggtaagagcacccgactgctcttccgaaggtccggagttcaaatcccagcaaccacatggtggctcacaaccatctgtaacaagatctgacgccctcttctggagtgtctgaagacagctacagtatacttacatataataaataaataaatcttaaaaaaaaaaaaaagaaaaaaaaaaaaagaaaaaacaaacctaagaaccaggcatggtgaggttatacatacatataaccctgacatttggaaggtggagccaggcttctcaggagttcaaagtcatgtggttccatgcggctcaaaaacacccacagaaagggtaccacatctcctgatcctcagtgggtacttcactggggggaggggtgcacagtgcgacaaggagccagaggttgaggccatgcaagtgtgctagaggtctggtggagaggtgaggtctaaaggtgggtgtggtgctttgtggcttagctcttccaggagggacctggtacagagctggaagctgtcccaggtcagtgctatttgggaccaggtctacttggggccttcatttgcccagctcccttgagtcttgagtggagatgtggagatagtccatgtgcccgcaggtccagcagatatccgattcatttgggagaagaacaggcatgccctggagacgtgtgtacctatgcagacccatgcactgcccgatggcagggcccatgccctcagctggcttcgggacaccatccaagaaaccaccgaatacagctgctctgtcctctcctcagcaggaaaccagacttcaaaggttcacatcactgtgatgagacacggtaagtgtggtccactctggcagcaacacgtctaggggctgactatcactatttagcctgta

SEQ ID NO: 74 - DNA, 4418 bp, Mus musculus
ccacgccggcctccgctccctctcgcgccgcagcatctccgcgcgtctcccggcctccccgactcaagctcctggcgccgttcgcctctgtcgtcgctgccaccaacgccgccgccattcttggcgcggagctggcctggccagcccccgccgagagcctccgcgggtcggacgcgcgctccagaccctggtaacaccacaggaacacagccaagtcctgaataccgacatgtctgacagtgctgatccctaggtcagacgggaacaccggcagccttggcatgacgtcgtgaaggtggccattgctaacctgacatgtggggactcaggaaccccaccccttatgggctccagtctgtgctgctggccccagctctggggctctaagaggtccttgctgctaccccacagcagcctgctgccatccatgtgtgcccgttgctgaaggcctcggtggcccctgcccatgaggatgtgtgcccccgttagggggctgttcttggccctggtggtagtgttgagaaccgcggtggcatttgcacctgtgcctcggctcacctgggaacatggagaggtaggtctggtgcagtttcacaagccaggcatctttaactactcggccttgctgatgagtgaggacaaagacactctgtatgtaggcgcccgggaagcagtctttgcagtgaatgcgctgaacatctctgagaagcaacatgaggtatattggaaggtctctgaagacaaaaaatccaagtgtgcagagaaggggaaatcaaagcagacggaatgcctaaactacattcgagtactacagccactaagcagcacttccctctatgtgtgtgggaccaatgcgttccagcccacctgtgaccacctgaacttgacatccttcaagtttctggggaaaagtgaagatggcaaaggaagatgccccttcgaccccgcccacagctacacatcagtcatggttgggggcgagctctactctgggacgtcctataatttcttgggcagtgaacccatcatctctcgaaactcttcccacagtcccttgaggacggagtatgccatcccgtggctgaacgagcctagcttcgtctttgctgacgtgatccagaaaagcccagatggtccggagggtgaagatgacaaggtctacttcttttttacggaggtatccgtggagtacgaattcgtcttcaagttgatgatcccgcgagttgccagggtgtgcaagggcgaccagggcggcctgcggactttgcaaaaaaagtggacctccttcctaaaggccaggctgatctgctccaagccagacagtggcctggtcttcaacatacttcaggatgtgtttgtgctgagggccccgggcctcaaggagcctgtgttctatgcggtcttcaccccacagctgaacaatgtgggtctgtcagcggtgtgcgcctacacactggccacggtggaggcagtcttctcccgtggaaagtacatgcagagtgccacagtggagcagtctcacaccaagtgggtgcgctacaatggcccagtgcccactccccgacctggagcgtgtatcgacagtgaggcccgggcagccaactacaccagctccttgaatctcccagacaaaacactgcagtttgtaaaagaccaccctttgatggatgactcagtgaccccgatagacaacagacccaagctgatcaaaaaagatgtaaactacacccagatagtggtagacaggacccaggccctggatgggactttctacgacgtcatgttcatcagcacagaccggggagctctgcataaagcagtcatcctcacaaaagaggtgcatgtcatcgaggagacccaactcttccgggactctgaaccggtcctaactctgctgctatcgtcaaagaaggggaggaagtttgtctatgcaggctccaactctggagtggtccaagcgcccctggcattctgcgaaaagcacggtagctgtgaagactgtgtgttagcacgggacccctactgtgcctggagcccagccatcaaggcctgtgttaccctgcaccaggaagaggcctccagcaggggctggattcaggacatgagcggtgacacatcctcatgcctggataagagtaaagaaagtttcaaccagcattttttcaagcacggcggcacagcggaactcaaatgtttccaaaagtccaacctagcccgggtggtatggaagttccagaatggcgagttgaaggccgcaagtcccaagtacggctttgtgggcaggaagcacctgctcatcttcaacctgtcggacggagacagcggcgtgtaccagtgcctgtcagaggaaagggtgaggaataaaacggtctcccagctgctggccaagcacgttctggaagtgaagatggtacctcggacccccccctcacctacctcagaggatgctcagacagaaggtagtaagatcacatccaaaatgccggttgcatctacccaggggtcctctccccctaccccggctctgtgggcaacctcccccagagccgccaccctacctcccaagtcctcctccggcacatcctgtgaaccaaagatggtcatcaacacggtcccccagctccactcagagaagacggtgtatctcaagtccagtgacaaccgcctgctcatgtctctcctcctcttcatctttgtcctcttcctctgcctcttttcctacaactgctacaagggctacctgcccggacagtgcttaaaattccgctcagccctgctgcttggaaagaaaacacccaagtcagacttctctgacctggagcagagtgtgaaggagacactggtcgagcctgggagcttctcccagcagaacggcgaccaccccaagccagccctggatacgggctatgaaacggagcaggacaccatcaccagcaaagtccccacggatcgtgaggactcgcaacggatcgatgaactctctgcccgggacaaaccgtttgatgtcaagtgtgaactgaagtttgcagattcggatgctgacggggactgaggccagcgtgtcccagcccatgcccctctgtcttcgtggagagtgttgtgttgagcccattcagtagccgagtcttgtcactctgtgccagcctcagtcctgtgtccctttttctcttgggttgagcctgtggctcatcccctttgtccttttgggaagcaagtatctattccagtctcaagtcctgcagttgctggagcgcttacgcacctgagccctttgtgtcctgggggagagatggccacctccgtgggctgcgaagagccaccccttcctcttccgattctcctagcagccactcagagataatttaattccagattggaaacgcccttttagtttatcagattggtaacttacatcctgctgcccagatggcacggacagttttctttcacttaattattattttttttttaaggattttcgctcctattgtgttgatgtcttaggtcattttctttttttctttctctttttttattaccagaggagatgttttaatattcatgagaagaggaacattttctagatttttttgttgttatatattgagatataaaatatggctatgttgcttaagattctcagggatagacttatttttgttaacttcattctttcctgctgttaggaacataggcctaaaattgtctcttgagtttgctcacccttttgttttggtagggtttttttgttgttgctgttattgtttctagtttttaatcttattcattttgaaggatttttctttctgaactttttaaatttttatattttcctgccatacatctacaaagtgggttttgagtgagggcaggtggcccagtggctttgggtggcgactgagctggtcccacgaggggaggagggtttatataccccatgaccctgcggcttcttggcgcctcctgcccatgaggatcacatcctgtctctccttgcttccatctctcatcactgcccttggacttccgccttgactgtccatgaaagacagaaatgggttgggtagttgggctcccaacctcggatggtgaccgcaacatcccgtgtgggcggccggccgctcctgcagcccgactctcctgccagtgtctttcaggatgtcaacgggtggtacgattctggcatttgtttctcgctcaccgtgtgtggaacactcattccatgtagagggtgacgaactctggattcccccccacccccaccccgtgccgtgtagacactcatcttctgcatgacatgatctaccattcggtgtaaacatttgtgtttataagatttactttgtttttatttttctacttggaactgtacacatttgaaaagtacccaaataaaccagaagctttatcgttgactg

SEQ ID NO: 75 - protein, 857 aa, Mus musculus
MRMCAPVRGLFLALVVVLRTAVAFAPVPRLTWEHGEVGLVQFHKPGIFNYSALLMSEDKDTLYVGAREAVFAVNALNISEKQHEVYWKVSEDKKSKCAEKGKSKQTECLNYIRVLQPLSSTSLYVCGTNAFQPTCDHLNLTSFKFLGKSEDGKGRCPFDPAHSYTSVMVGGEKGTSYNFLGSEPIISRNSSHSPLRTEYAIPWLNEPSFVFADVIQKSPDGPEGEDDKVYFFFTEVSVEYEFVFKLMIPRVARVCKGDQGGLRTLQKKWTSFLKARLICSKPDSGLVFNILQDVFVLRAPGLKEPVFYAVFTPQLNNVGLSAVCAYTLATVEAVFSRGKYMQSATVEQSHTKWVRYNGPVPTPRPGACIDSEARAANYTSSLNLPDKTLQFVKDHPLMDDSVTPIDNRPKLIKKDVNYTQIVVDRTQALDGTFYDVMFISTDRGALHKAVILTKEVHVIEETQLFRDSEPVLTLLLSSKKGRKFVYAGSNSGVVQAPLAFCEKHGSCEDCVLARDPYCAWSPAIKACVTLHQEEASSRGWIQDMSGDTSSCLDKSKESFNQHFFKHGGTAELKCFQKSNLARVVWKFQNGELKADKYGFVGRKHLLIFNLSDGDSGVYQCLSEERVRNKTVSQLLAKHVLEVKMVPRTPPSPTSEDAQTEGSKITSKMPVASTQGSSPPTPALWATSPRAATLPPKSSSGTSCEPKMVINTVPQLHSEKTVYLKSSDNRLLMSLLLFIFVLFLCLFSYNCYKGYLPGQCLKFRSALLLGKKTPKSDFSDLEQSVKETLVEPGSFSQQNGDHPKPALDTGYETEQDTITSKVPTDREDSQRIDELSARDKPFDVKCELKFADSDADGD

SEQ ID NO: 76 - DNA, 4269 bp, Mus musculus
gcagaggccccacttgaaggtagagtggctggaccagaaaagtcctgagggccgaggtgcaagctagcagccaggaagacagagcagggctgggagtccagctgcagaaaggtcagacgggaacaccggcagccttggcatgacgtcgtgaaggtggccattgctaacctgacatgtggggactcaggaaccccaccccttatgggctccagtctgtgctgctggccccagctctggggctctaagaggtccttgctgctaccccacagcagcctgctgccatccatgtgtgcccgttgctgaaggcctcggtggcccctgcccatgaggatgtgtgcccccgttagggggctgttcttggccctggtggtagtgttgagaaccgcggtggcatttgcacctgtgcctcggctcacctgggaacatggagaggtaggtctggtgcagtttcacaagccaggcatctttaactactcggccttgctgatgagtgaggacaaagacactctgtatgtaggcgcccgggaagcagtctttgcagtgaatgcgctgaacatctctgagaagcaacatgaggtatattggaaggtctctgaagacaaaaaatccaagtgtgcagagaaggggaaatcaaagcagacggaatgcctaaactacattcgagtactacagccactaagcagcacttccctctatgtgtgtgggaccaatgcgttccagcccacctgtgaccacctgaacttgacatccttcaagtttctggggaaaagtgaagatggcaaaggaagatgccccttcgaccccgcccacagctacacatcagtcatggttgggggcgagctctactctgggacgtcctataatttcttgggcagtgaacccatcatctctcgaaactcttcccacagtcccttgaggacggagtatgccatcccgtggctgaacgagcctagcttcgtctttgctgacgtgatccagaaaagcccagatggtccggagggtgaagatgacaaggtctacttcttttttacggaggtatccgtggagtacgaattcgtcttcaagttgatgatcccgcgagttgccagggtgtgcaagggcgaccagggcggcctgcggactttgcaaaaaaagtggacctccttcctaaaggccaggctgatctgctccaagccagacagtggcctggtcttcaacatacttcaggatgtgtttgtgctgagggccccgggcctcaaggagcctgtgttctatgcggtcttcaccccacagctgaacaatgtgggtctgtcagcggtgtgcgcctacacactggccacggtggaggcagtcttctcccgtggaaagtacatgcagagtgccacagtggagcagtctcacaccaagtgggtgcgctacaatggcccagtgcccactccccgacctggagcgtgtatcgacagtgaggcccgggcagccaactacaccagctccttgaatctcccagacaaaacactgcagtttgtaaaagaccaccctttgatggatgactcagtgaccccgatagacaacagacccaagctgatcaaaaaagatgtaaactacacccagatagtggtagacaggacccaggccctggatgggactttctacgacgtcatgttcatcagcacagaccggggagctctgcataaagcagtcatcctcacaaaagaggtgcatgtcatcgaggagacccaactcttccgggactctgaaccggtcctaactctgctgctatcgtcaaagaaggggaggaagtttgtctatgcaggctccaactctggagtggtccaagcgcccctggcattctgcgaaaagcacggtagctgtgaagactgtgtgttagcacgggacccctactgtgcctggagcccagccatcaaggcctgtgttaccctgcaccaggaagaggcctccagcaggggctggattcaggacatgagcggtgacacatcctcatgcctggataagagtaaagaaagtttcaaccagcattttttcaagcacggcggcacagcggaactcaaatgtttccaaaagtccaacctagcccgggtggtatggaagttccagaatggcgagttgaaggccgcaagtcccaagtacggctttgtgggcaggaagcacctgctcatcttcaacctgtcggacggagacagcggcgtgtaccagtgcctgtcagaggaaagggtgaggaataaaacggtctcccagctgctggccaagcacgttctggaagtgaagatggtacctcggacccccccctcacctacctcagaggatgctcagacagaaggtagtaagatcacatccaaaatgccggttgcatctacccaggggtcctctccccctaccccggctctgtgggcaacctcccccagagccgccaccctacctcccaagtcctcctccggcacatcctgtgaaccaaagatggtcatcaacacggtcccccagctccactcagagaagacggtgtatctcaagtccagtgacaaccgcctgctcatgtctctcctcctcttcatctttgtcctcttcctctgcctcttttcctacaactgctacaagggctacctgcccggacagtgcttaaaattccgctcagccctgctgcttggaaagaaaacacccaagtcagacttctctgacctggagcagagtgtgaaggagacactggtcgagcctgggagcttctcccagcagaacggcgaccaccccaagccagccctggatacgggctatgaaacggagcaggacaccatcaccagcaaagtccccacggatcgtgaggactcgcaacggatcgatgaactctctgcccgggacaaaccgtttgatgtcaagtgtgaactgaagtttgcagattcggatgctgacggggactgaggccagcgtgtcccagcccatgcccctctgtcttcgtggagagtgttgtgttgagcccattcagtagccgagtcttgtcactctgtgccagcctcagtcctgtgtccctttttctcttgggttgagcctgtggctcatcccctttgtccttttgggaagcaagtatctattccagtctcaagtcctgcagttgctggagcgcttacgcacctgagccctttgtgtcctgggggagagatggccacctccgtgggctgcgaagagccaccccttcctcttccgattctcctagcagccactcagagataatttaattccagattggaaacgcccttttagtttatcagattggtaacttacatcctgctgcccagatggcacggacagttttctttcacttaattattattttttttttaaggattttcgctcctattgtgttgatgtcttaggtcattttctttttttctttctctttttttattaccagaggagatgttttaatattcatgagaagaggaacattttctagatttttttgttgttatatattgagatataaaatatggctatgttgcttaagattctcagggatagacttatttttgttaacttcattctttcctgctgttaggaacataggcctaaaattgtctcttgagtttgctcacccttttgttttggtagggtttttttgttgttgctgttattgtttctagtttttaatcttattcattttgaaggatttttctttctgaactttttaaatttttatattttcctgccatacatctacaaagtgggttttgagtgagggcaggtggcccagtggctttgggtggcgactgagctggtcccacgaggggaggagggtttatataccccatgaccctgcggcttcttggcgcctcctgcccatgaggatcacatcctgtctctccttgcttccatctctcatcactgcccttggacttccgccttgactgtccatgaaagacagaaatgggttgggtagttgggctcccaacctcggatggtgaccgcaacatcccgtgtgggcggccggccgctcctgcagcccgactctcctgccagtgtctttcaggatgtcaacgggtggtacgattctggcatttgtttctcgctcaccgtgtgtggaacactcattccatgtagagggtgacgaactctggattcccccccacccccaccccgtgccgtgtagacactcatcttctgcatgacatgatctaccattcggtgtaaacatttgtgtttataagatttactttgtttttatttttctacttggaactgtacacatttgaaaagtacccaaataaaccagaagctttatcg

SEQ ID NO: 77 - protein, 857 aa, Mus musculus; identical to SEQ ID NO: 75

SEQ ID NO: 78 - DNA, 4367 bp, Mus musculus
gtgaacaagccccgcaggaactggataagagaggtcatctgcttggggccctaaggagtttgtatttagtgcctgtctgaaacccaagcgccccgtgagggtggaggacccaggggcttgactcttagtctctcattactttcagagatgtcttcctgaagcttccattctaaaggtgccaggaacaaccccagagactcacggcacaggtcagacgggaacaccggcagccttggcatgacgtcgtgaaggtggccattgctaacctgacatgtggggactcaggaaccccaccccttatgggctccagtctgtgctgctggccccagctctggggctctaagaggtccttgctgctaccccacagcagcctgctgccatccatgtgtgcccgttgctgaaggcctcggtggcccctgcccatgaggatgtgtgcccccgttagggggctgttcttggccctggtggtagtgttgagaaccgcggtggcatttgcacctgtgcctcggctcacctgggaacatggagaggtaggtctggtgcagtttcacaagccaggcatctttaactactcggccttgctgatgagtgaggacaaagacactctgtatgtaggcgcccgggaagcagtctttgcagtgaatgcgctgaacatctctgagaagcaacatgaggtatattggaaggtctctgaagacaaaaaatccaagtgtgcagagaaggggaaatcaaagcagacggaatgcctaaactacattcgagtactacagccactaagcagcacttccctctatgtgtgtgggaccaatgcgttccagcccacctgtgaccacctgaacttgacatccttcaagtttctggggaaaagtgaagatggcaaaggaagatgccccttcgaccccgcccacagctacacatcagtcatggttgggggcgagctctactctgggacgtcctataatttcttgggcagtgaacccatcatctctcgaaactcttcccacagtcccttgaggacggagtatgccatcccgtggctgaacgagcctagcttcgtctttgctgacgtgatccagaaaagcccagatggtccggagggtgaagatgacaaggtctacttcttttttacggaggtatccgtggagtacgaattcgtcttcaagttgatgatcccgcgagttgccagggtgtgcaagggcgaccagggcggcctgcggactttgcaaaaaaagtggacctccttcctaaaggccaggctgatctgctccaagccagacagtggcctggtcttcaacatacttcaggatgtgtttgtgctgagggccccgggcctcaaggagcctgtgttctatgcggtcttcaccccacagctgaacaatgtgggtctgtcagcggtgtgcgcctacacactggccacggtggaggcagtcttctcccgtggaaagtacatgcagagtgccacagtggagcagtctcacaccaagtgggtgcgctacaatggcccagtgcccactccccgacctggagcgtgtatcgacagtgaggcccgggcagccaactacaccagctccttgaatctcccagacaaaacactgcagtttgtaaaagaccaccctttgatggatgactcagtgaccccgatagacaacagacccaagctgatcaaaaaagatgtaaactacacccagatagtggtagacaggacccaggccctggatgggactttctacgacgtcatgttcatcagcacagaccggggagctctgcataaagcagtcatcctcacaaaagaggtgcatgtcatcgaggagacccaactcttccgggactctgaaccggtcctaactctgctgctatcgtcaaagaaggggaggaagtttgtctatgcaggctccaactctggagtggtccaagcgcccctggcattctgcgaaaagcacggtagctgtgaagactgtgtgttagcacgggacccctactgtgcctggagcccagccatcaaggcctgtgttaccctgcaccaggaagaggcctccagcaggggctggattcaggacatgagcggtgacacatcctcatgcctggataagagtaaagaaagtttcaaccagcattttttcaagcacggcggcacagcggaactcaaatgtttccaaaagtccaacctagcccgggtggtatggaagttccagaatggcgagttgaaggccgcaagtcccaagtacggctttgtgggcaggaagcacctgctcatcttcaacctgtcggacggagacagcggcgtgtaccagtgcctgtcagaggaaagggtgaggaataaaacggtctcccagctgctggccaagcacgttctggaagtgaagatggtacctcggacccccccctcacctacctcagaggatgctcagacagaaggtagtaagatcacatccaaaatgccggttgcatctacccaggggtcctctccccctaccccggctctgtgggcaacctcccccagagccgccaccctacctcccaagtcctcctccggcacatcctgtgaaccaaagatggtcatcaacacggtcccccagctccactcagagaagacggtgtatctcaagtccagtgacaaccgcctgctcatgtctctcctcctcttcatctttgtcctcttcctctgcctcttttcctacaactgctacaagggctacctgcccggacagtgcttaaaattccgctcagccctgctgcttggaaagaaaacacccaagtcagacttctctgacctggagcagagtgtgaaggagacactggtcgagcctgggagcttctcccagcagaacggcgaccaccccaagccagccctggatacgggctatgaaacggagcaggacaccatcaccagcaaagtccccacggatcgtgaggactcgcaacggatcgatgaactctctgcccgggacaaaccgtttgatgtcaagtgtgaactgaagtttgcagattcggatgctgacggggactgaggccagcgtgtcccagcccatgcccctctgtcttcgtggagagtgttgtgttgagcccattcagtagccgagtcttgtcactctgtgccagcctcagtcctgtgtccctttttctcttgggttgagcctgtggctcatcccctttgtccttttgggaagcaagtatctattccagtctcaagtcctgcagttgctggagcgcttacgcacctgagccctttgtgtcctgggggagagatggccacctccgtgggctgcgaagagccaccccttcctcttccgattctcctagcagccactcagagataatttaattccagattggaaacgcccttttagtttatcagattggtaacttacatcctgctgcccagatggcacggacagttttctttcacttaattattattttttttttaaggattttcgctcctattgtgttgatgtcttaggtcattttctttttttctttctctttttttattaccagaggagatgttttaatattcatgagaagaggaacattttctagatttttttgttgttatatattgagatataaaatatggctatgttgcttaagattctcagggatagacttatttttgttaacttcattctttcctgctgttaggaacataggcctaaaattgtctcttgagtttgctcacccttttgttttggtagggtttttttgttgttgctgttattgtttctagtttttaatcttattcattttgaaggatttttctttctgaactttttaaatttttatattttcctgccatacatctacaaagtgggttttgagtgagggcaggtggcccagtggctttgggtggcgactgagctggtcccacgaggggaggagggtttatataccccatgaccctgcggcttcttggcgcctcctgcccatgaggatcacatcctgtctctccttgcttccatctctcatcactgcccttggacttccgccttgactgtccatgaaagacagaaatgggttgggtagttgggctcccaacctcggatggtgaccgcaacatcccgtgtgggcggccggccgctcctgcagcccgactctcctgccagtgtctttcaggatgtcaacgggtggtacgattctggcatttgtttctcgctcaccgtgtgtggaacactcattccatgtagagggtgacgaactctggattcccccccacccccaccccgtgccgtgtagacactcatcttctgcatgacatgatctaccattcggtgtaaacatttgtgtttataagatttactttgtttttatttttctacttggaactgtacacatttgaaaagtacccaaataaaccagaagctttatcg

SEQ ID NO: 79 - protein, 857 aa, Mus musculus; identical to SEQ ID NO: 75

SEQ ID NO: 80 - DNA, 136489 bp, Homo sapiens
  misc_feature (1)...(136489): n = A,T,C or G
aattaccatatgacctagcactcccactcctacgtatatacctaaaagaattgaaagcagggactcacacaaaaacttatacacggctgttcacagtggcactattccagtagccaaaggacggaaacccagatgtccagcagtggatgaatgggtaagctaaatgtggtatattcatacatggcctatgattcagccataaaaaggagtgaagcgctgatacatgctacaatgtgaattcacctcaaaaacattattctaagtgaaggtagccaggcacagattaatagctgcatattgtattatttcattgatatgaaatgttcagaatgggcagatctttccagacagaaaacacgttagtggttgccaggagctggggaggtgggggaatgggaagtgaacacttaatatgcattggggttccttttgaggtcctggaactagataggggtgatggttacataacattgcgaatgtactaaatgccactggattatacgctttaaaatggtaaattttatcttacgagtattttaccacaataaaagatgatataagacatgctgtgagcattcgtgggcaaatcttagcgtggacatatgtttttatttctcctgcgtaactacctacaagtggaattacagggtttcatggtaagtagatgtttaacttgattaaaaatctggcaaactgctttgcaaagcagttgtatcattttacgttcccactgctaacgcatgagagttgcagttggtttacgtctgtgccaacacttgctgttgtcagtcttattaattttagctattctagtggaaatgtggtagtgctgtatctgtgcagttttagttgagcgtcttttcatgtgcttattagctatttgtgtatattcttttgtgaagtgtctgttcagatcttttgatcactttttaattgggttgtcttcttatatgtgagttgtaggtgttctttacatattcttgactcaaaccttttgtcagatacttgtattgcaaatattttctctcagtctatggcttgcctttttatccgttatatctttcaatgggcagactttttggttttaagttgttttaatggtttgtgctttttgtaccctatttaagaaatctttgtctaatccatagtgataaagattatctgtgttttcttctgaaaatgtggtaattttagcttttatgtttagatctgagatccattttggttgggcgtggtggctcacgcctgtaatcccaacagttcgggaggctgaggtgagtggaacacctgaggtcaggagtttgagaccagcctggccaatatggtgaaaccctgtctctactaaaagtacaaaaattagccggatgtgatggtgcacgtatgtaatcccagcttcttgggagcctgaggcaggagaatcacttgaacctgggaggcggaggttgcaatgagctgagatcgcaccattgcactccagccactccagcctgtgtgacagagtgagactctgttctcaaaaaaaaaaaaaaaaaaaaaaaaaaaaaagatctgtgatccatttcgagttaatttttaatggaaagagctaaggattgaggttcattgttttacatgtagacttccgattgttctcacaccatttgttttaaagtaaacaacaacaacaagcctcttctttctccagtgaattatgttggtaccatgtttgtaaagtaattgaccatatctgtgtgcctttgtttctggattctgttctgttccattatggcttattcctcataggtcccagtatcacactgtctctgtagtaactcctgaagtcaggtagcatgacaattttgcttcattttcaaaattgtagtgtcggttctagatcctttgcattttcttatatacttaagatcagtttgtcagtttctacagcaagcctgcttggattttggccagaattgtattaactccttagatcaatttgggaaaaaacattgtaacaatatttggtctcttgaccaatgagcatggaatctccctctattttcatcttcctttatttctttcagcagtgttttgtagttttgagtgtacaggtcttgcacatgttttatcagatttactcataagtatttcatattattatacatggattttaaaaattttattttccagttgttaattgcgatatatagaaatacaattgattttttctattttttgtttatcctgtgaactttgctaagtcgctatttaagtagctttttttgtagtccctcaagatctttcatatagataattctgatgattatgaataaagaccagtttctttccagttagaatgccttttactcctttttcttcttttctttcacttctaggactttcagtacaatgattaatagaagtgataaaagtggacattcttgcctgttcccaatatcaggaaggaagaatttcaagttttgttgttgttgttgttaagtatgatgttaggtaaagatatgaagtgccttttacaaggcggtggaagttttttaatttgttgagagcttttatcatgagtaggtgttgaatttcctcatatactttttctgtatctgttgagatgatcatagggtttttcattttttgtttgtaaatatggtgaattacactggttaacttttgaatgttaaatcattcttgcatttctggcacaaatcccacttggtaattatgtatcttttttatatatttgttttatatattatatatatatatttatatattgctggatttgatttgctgcaattttattaaggatatttgtggctatgtcatgagggatattgttttcttttctggtactgtattttatattggtatcaaagtaaagtttgccccacacaatgatttgagaagtggttcctcttactatttttgaatagtctttgtaggattgggcttctcttgccctcccctccccttcccttcctttccctttttggagacaaggtctcactgtgttgtccaggctggagtgcagtggtacaatcatagctcaatcatagctcactgcagccttgacttcctgggctcaagtgatcttcctgcctcagcctccagagtagctgggactacaagcatacaccactatgcctggctaatttttttgaattttagcagagacagagtttcactatgattcccaggctggccttgaattcctaacctcaagccatcttcccgctttggccttctgaagtgctgagcttacaggtgtgagccactgtgcccagcctgtctggggttttctttatggagaggcttttaattatgaattcaattccttaacataggactatgaagattttctgtttctgtttgagtcagttctggttatttgtgtgatttattgagctataattttatatacagtgaaatctttcctgttaaatgtaccattctgtgagttttggttaatgcatgtggttttggtaaatataaccataccaaatcatttccacaccaaatcaaggtatggaaaattttcataactccaaaaattccgtcttgtgcccctttgtagtcagtttcctttccccagacctagcaaccactgacctgttttccatccctctaggcttttccagaatttcatatagaaggaattatacagattgtagcctttgagtctggcttctttcactcagcataattatgcaggtatttgagcagtaaataaagcaatcagatcgatgtctcaggagtaactctggcatttcagagtgatgaattggaaagacagattggaaacaagggaaagaagttatgggacaagaatgctagatgacgttcatggtgaccttgttataaatgatatgccaaactctatccgtctcatggagttctgaccacagtcctgtaagactgggtcagttctcccctcttgtttacaggtgagaacagagagaataagaatgttattcttgaagccgctcagccaagaagtggtgaagccaggagttgtgattcgatgctctatactgaggtccagcatctaatgcatgcactaggaggtggcagttggttagtggttttttttttttctttttttttttttttttttttttttgagatggagttttgctcttgttgcccaggctggagtgcaatggtgcaatcttggctcactgcaacctctgcctcccaagttcaagtgattctcctgcctcagcctcccaagtagctgggattacaggcatgcgccaccatgcccggctaattttgtatttttagtagagatggggtttctccatgttggtcaggctggtcttgaactcccgacctcaggtgatcctcccgtcttggcctcccaaagtgctaggattacaggtgtgagccaccgtgcccagcccggttaatgttttaaagattttaaggcacatgtaccctttggccattggagtctgaatgagctagacatttatttaaagaatcatgaatgttaagaagcatttattgaaaagggtgtttctcagtgtttataaatagaaaatccagatataacctgggcagctactgacagtgaaatagttaggcaggatgtgccatagtaacattggtcactctttgaaaatctagtgtaaaatatgcctaatgagatgagaagtcagcataatacatcatgtgttaagaacagtttgtgaaccaacatgcatggcaaggacttacaattgcctagaaagcactagaccatgtccaaaatgcgagtcagatgtttagttgatgacgtgccttctgttttctccttggtgcttgtctacatttctctgattttctgcaacaatacttgttatggaaatcacaaaggagaaatacaaaggaaaaggttgaaaaatgtagctctggaacacacacacacacacacacacaacatactacacacatatgcctccaccacccacccagtacacacacaccaaacaacacacacatacacatcacaccacacaccccataccacacactacacacataccccccacaccacaaacacccagtatacacacattacacacacaccacacaatacatccacacaccacacacccaccacacaatacatccacacaccacaccacacattccccataccacacacttcacacatacctgccacaccacacacacataacacacaacacatccatacaccacatcacataccacacacacagccaccacactacatacacacaccacaccacacacacactacatatatactgcatacatacaccgcacatcacaccacggaacaccccatactacacacataccccaccatgtatacacacaccatacacgtacctccccaccccacacacccagtccatacacaccacacacactacacaaacccaccacgtggtacatacacataccatgccacacacacacacaaaacacacacaacacacactgtacacatacacaccacacacaccacacatcaaaccccacacataacaccacacagtcatatgctgcacgtgccgcagcacacacagcacacacataccccgtatgcatcggagtcttgagagctttgcacacttttcctagactggtcatgcgtgccttgttcccagagcaggtgggtgttttgcagcttgttctgctcctaaagggcatgcaggcagtgaagctggccggcccctcgcttgcctctcccagatgcagcccagctgcaggtgggcctgcagggcggggtggccgcggcgtcctctttaaggctccagttcctgggggagcccggaagcccttctgtgcctgccagcttgtgcgcagcctcagtggggcccgccctcttccttagtggggttgtccctcagtggttgttgggggactgtaggattattaaatgagatgactcctgtaatatcccttcttgcccacgtttgaactgagatgcatgtggaattcagtgttatgtttgaaaccaagcctcaggaaggtttcagtgcatggaccatattgctaaaacattttttattacaatacaaaagcttcttgaccatcaggcagcctggctgtgtgggtgtctcatgcctggctggcttcagacgctgacagtgacccacatgcattttatattgtgaggcagcacacgcacacacacacagcacacagatgcacacatgccagtaagttttgctcataacagccgcccttaactatctgtgacaccccctgatatttttatttgattatatttgttgaaaaactgtgtttgcaacccccagattgagaactactgacccccatgtgacatctggccctatgtgtaactgcatggaaatgtaaaaattttagcgtgacgtcaatgtgtgtacactatgtattattatcttatttctcacgttggctgactttgaccatgtactcctctaccgcttgattttcctctcagtgaggctaatccccacatttctggggctggacatgccttagagccttcagcacagtgcctaccccaggggctggtgttggaccgcaagcctgagaacaacagggcaggaaaactgggtcaaagcagagctcttgagcaggtggaattggatatctagcttgtctttgaatgctgagggcagtggcttgggtttcaaatgtggaatcctgggaagccgcctggctcccttggtcttgcctgtaagcagcggctgcgtcctggatgttctgtggggctgaggtctctctgtgcagggatctgccatcctcatgttccagttccttccacaagagcacggttggagcagggcttggtttttgccagcttggcgaaaccagagaggtggtgagaaggcgatttttaaaatagacaccagtcgctgcaggacctggaatcaagccttcggggagatacagactccatttatttacaagtaaccgctctgtgactccagccagtgggcacaggttttatttcaactggaagagagtgtcatttaataattagcacatttagggctgcagaagggatagatggcttagcacagatgtctcgcggtggaaatgaaggagccctgagaatgcagacatgctctctcccctttctcttttctcagcgaggagaccatgctcaggccacagtggcattctctaaataagtgatggtgtcatctggagacttccactgagacattttgtgtcaggactactctgaagccttttcaagcacttacattgtagttgctacagacggaaaaacactttgccaagcacagccttattcatgaattgtgtcaggccgggagtccgttcctgctggtgtcaccctccccaaactgctgggctgggggccctctccttgctgctggaggaggcagagtgtgcctcctgctgcacaggagacatttgctacagtgcagttatcctgagctttgcggggccttctgctgctggggctgagaatggctgggaggcttccctgaggatcagagctgttgctgatgcctgtgtaaaccctaacgagtgtggcccgtgctgttctttgcgttgtgactcttccaagtgcctgtctgatcagagctgacatgaagagcagattccatggtctgagactctggcctcgtggtcgtcagagtgatccaggtgtggcctgcttggtggccttgctggtgcacattctctgtggacgtgtcccaggagggcagtaggatacagccagccagtggatggtggacattgcaagtgctctgaccgctgtgagctggttggtcctcaactggctttgctgccttcttcttagagcagctgggtcggctccatggcccactactttgcagtggatcccctcacccgtctgggcggtgacccctctccctgcctcctttcccctcttggagtcaagggaaggtcatcgacaggaagcagcagcagcgaaaccctctcaccaggtttgctgttttcatctttccatctcctccttccttctgcagtgagatatttgcagaatttactgtgaagcacacctagcctcagtgtgcggcccttgaatcttcacaaatggagccagccctgcgatgcctgggaagaggagcagagcacagggccctggggccccctgctcaccactccccagctgatcacagcgcaggttaatcttggctggcttgagtctgtgtgccttgggttctgcagcacatcctcgtgcgtgtcactcagcatccgtctgtgacatttggcttgagctcacccagggtcttcttctcttgccttgccaccacgtattccggtgtgtgtgtctgccacaatttaggcacatttatatccgccacgggtgtctgctgccctctcggcttccagtttgaggctgttaggaatgatattttgaacatccttgcacacaggctgtgttttagccttttattgtcctttcaggacaccaagggccctccagttcttatggctccacttcctggggcaggtcttgtctccgtggtggcacctgtggtttaattttgtctcagacctcccacgtggcaccctgtttccagtcctgctgtgaaccctctcctctgagaaggggcccctgaaccagctcctgttgcttgctgatgggccccgcctccctcgctggaccctcgggggtctctccagctgtcccctctgtgcatcccaccccaccgccacctgctcaccaaggccaggtgggcacgtccctgtcattcctaacatggtgtttttcagcttcacagtttctgtctctggctgcacagggtccactcaatctgctgccatctacccctcggagagcatgcagtgcctgcctagtgtgtcccaggttctgggatggcagtgagaggttgggggttggaggagaatggacaagacgtgttacttttagcgggagaaggatgtgtgtatgtactgatagtgagaggtgacagcgtgctagcagtcctcagagccctcgcttgctctcggcacctcccctgcctgggctcccactttggcggcatttgaggagcacttcagtcccccactgcactgtgggagcccctttctgggctggccaaggccggagcccactcccccagtttgtagggaggtgtggagggagaggcaggagcgggaacaggggctgtgtgcggcacttgcgggccagctggagttccgggtgggcgtgggcttggtgggccccgcactcggagcagccagccagcccttctggccccgggcaatgggggacttagcacccgggccagtggctgcggagggtgtactgagtcccccagcagtgctggcccaccggcgctgtgctcgatttctcaccgggccttgactgccttcccacggggcagggctcgggacctgcagcccgccatgcctgagcctcccacccactccatgggctcctgtgcggcccgagcctccccgacgagagccaccccctgctccacggcgcccagtcccatcgaccacccaagggctgaggaatgcgagcgcacggcacaggactggcaggcagctccacctgcagccccggtgcgggatccactaggtgaaaccagctgggctcctgagtctggtggggacgtggagagtctttatatctagctcagggattgtaaatacaccaatcagcaccctgtgtttagctcaaggtttgtgagtgcaccaatcgacactctgtatctagctgctctggtgaggacgtggagaacctttatatctagctcagggattgtaaatacaccaatcagcaccctgtgtttagctcaaggtttgtgagtgcaccaatcgacactctgtatctagctgctctggtggggccttggagaacctgtgtgtggaaactctgtatctaactaatctgatggggacgtggagaacctttctatctagctcagggattgtaaacgcaccaatcagcgccctgacaaaacaggccactcggctctaccaatcagcaggatgtgggtggggccagataagagaataaaagcaggctgcccgagccagcattggcaacccgctcgggtccccttccacactgtggaagctttgttctttcgctcttgctactgctagctctttgggtccacgctgcttttatgagctgtaacactcaccgcgaagatctgcagcttcactcctgagcccagcgagaccacgagcccaccgggaggaacgaacaactccagacgcgctgccttaagagctgtaacactcaccgtgaaggtctgcagcttcactcccgagccagcgagaccacgaacccaccagaaggaagaaactctgaacacatctgaacatcagaagggacagactccagacgcgccaccgtaagagctgtaacactcaccgcgagggtccacggcttcattcttgaagtcagtgagaccaagaacccaccaattccggacacaataggggatacaggggctttgaggggatcttgagggtgaggctgcccaacgaggacggggctgaggtgttgaagtaacaaacactgagttagaactcagagcaaatcggaaacagctggtggctgagctgggcgaaaagctgtagtttttaaaacatggtggccaatctcgccattgctgccactgagatgcagggtgtctgtccccttgctgtggatctgggttacttcctgactgccttgattggtggaatgtggtgggtgtgaggctgagtgacccccaatgtggcttccccattgttcaccaggatgctggctctgggagccctgtgatgccaaggaaggagttggccctttggcagccatgctgtgaggaaacccaagctccacaggcagccatgggagctccagtgggcagccctggtattcagtcccctccactcagggccctgataagtgaggggacaggccttccaaggactgtagctgtagcccttggtaattaggtgtgtcagctttggtgtccttggacattggagcagagatgagctgactgaagctggggcccgctgaggctcctcacccacagaattgggagtgtagtaacatgttgcaggctgctgagttcagggtaacatgcaacacagcagcagtgacaggaacaaaagcggtggctgcccaaggagggggaaggaagggccttggggtggggtggggtggggtggaggatgagggggccataggactcaggttttgggtgggagagtggagtgtgaacaagaggcagacccctaacaagggtgcagtgaggatgattcatttcatctcattccgcacattttcatagtctgtgtattgggggctttcttgctttctctgtaaatgaaccatgaaggaaacaatcccttttcataggcgcacaggggacatagggatgaatgtctggtagctgccataaaaagtaccacacactgggtggtttccaacaacagaaacttattctcccagttctggaggtcagaagtaaaaatcaaggtgtcagcagggccacactcccctgaggctctaggggggcctccgtcctgcttcttccctcttgtgtggccccagtgtcccttggcttgtgacacattgctccagtctctgctccaacatcacatggcgtctgcgtctgtctttccctctgagtgtatctataagggcacttgtccctggatttagggcccactcagataacccagggagatctcatcctgagattcttacatctagaaagaccctttttgcaaacaagattgcatctcttcaacctgttacagcacacaagaaggcaattgaaatactgcgcgggctgagctggtggccctggtgggcggagacagggctggcaggctttcaccttctccaggatatatttcagcagggctttatcagcaggaaaatggaaaccacagctgctttttgcctttgtgggaagctgtagaaataagagtacagtggaaactctctgcttcgtaaaataacttcatgttgactcagaggggaaacaggaaaggtgccttctatcttttttatgcgagtttttctctctgttggtggggcctttgcttttaaggagtgtttctacaagaatacttgttggatatttagtgtgaacaggaagtaagatgtgctgactaacttttccattattttaatggcatttttattgctcagaaaatgaagacagaaagcaaagagtgaacgctttcattgtgctgggtaaatgccataaacaacctgcctttctgaatttttttctctgcgattttcagatgcacacacatgcgtgcatgcataagtacacacacatccatagagggggtgtttccccaaagtcgcggtcatgccacgcagaggtatgcaccttgctttatttgctcaccactgtgtcatagatgtgtatgttctgcagtgtgctacgaagccatgtgtgcccttgtgtgtgctgtgtgtccctggggccttcagtggaggtctctccagtctgccacacccttgactgttttccttggtgtacattactcttgtcaaggcattgattagcaggacatgtgatggcccctgtgaatggtggagcccagaaaatgaaattggcagtgttttagtaggccgtgtgtgtttgtgtgtgtgtgggggggtgcatgcatgtgtgtatgtgaatgtgtgtgagcatttgtgtgtgtgtgtgtgtacgtgcatgtaccttgtgcatatatgcatgtgtgtgtgagtgcctgcctgcacatgtgtgctcataggttccagaatagcagtgcacagcatgctggaagtctgcattctgggagagtttcttggatttaggagtctcttctcattaggaggcttactgaacttattttacggaagtcttagttgtatttttagccaaaagataaaactcgccccactctcctccatgcctccagcttgtctaaagtgaaatggcctggggagaatttgacatggtagtacagtgatgtggtgtgtttctctggggtcagatatgtcggctctcctatccctggacaggtcagcccagtatcccagccaaatattgtgtatgtgcctagatccttcacaggcatgactttttgttggtgccatgtggtcatgggggcttccttccgcagtcaggttctgctccgaagtggggattggaggcatctctggagcctggcgtgatacctttgccatgtccctgattgattgtgtcggtcagggtcccccacagaagtgaaactaatgggtgtgtgcatgtgtatgcgtgtgtagacattacaaggaattggctcacctgattgtggagatgccacgagtctaaaatatacagcaggctggagacccagagaagaattgcagctcaatggaaggctgtctggaggcagaactttctgctcttctccttgggggaggtcagcctgtgctattcatgccttcagctgattggatgaggaccaccctcattacagagggccatttgctttactcaaagcctctgctttaaatgttgatctcattaaaaaagtaatacctccacagaagtatcaagaataatgattggccagatatctgggtactgtggcacagccaagttgacatgtgacatcagccatcacactggtcagtgctccccagtgcacgggccccgtggcatgctatgttttataaaccagtgtgggccctaggtaaggtgtgtgagcttgctcaaggtgtattgtatgaaggtgttgccctgctcccagaagcctgccccagagcaggcagggcttgttattcttgcccagagatcatcgggccagcatgaggtggccgaaggttggcacttcttacattctaatggcaccaggagcgaggtccggggccttgtgcaagctgcgctcacacctcagccgaccttctgcttcttaggaaggttgcttcattccggtcaccactggccccatatttaagcatcagtaataccttaggtgcctctggggaccattcctgttgtcctccttccaaaaactgcttcattttccttcaaaatgtgacatggcttggacatgctagaggcatttattagcagaaagcctgggagctctgcctccatgatattttctttttctgggaaaaaaaatatttgtgcaagccatggtcatatcattgtttcccgctctctgtgagcctgctgacattggcctcccgtgtgcctggcgtgctcttatcagacctgtgtgccatcctgtgaattctaccgtaaacagtcacagcgaggcgggagaaacacagcctggtggtccacggcaggcttggtctggactggatgggagctgcctgatggatcagtaggggaatgcagaggggtgccagctccaggactggtaaaggtggctcttctctttcttttccatcaggtgcagtgttggagtgaatgaatgattgatgggtgaacaagtgagagagtggagctggtcacagaggtaggagggactcaggtcactggccgtgtggtgggagtggggagctgagcccatgccaaggctgtgacccatggaccagtcctggtgtggttgggctggcaggagtgggtgtttgttcctgggactggtggtcagcatgtgtccccttccctgcttctcactggctgaggctcaggatctgggggcccagcaggccccttctggctcccaggtgggtggggacatgggtctcagtcccacctgctttcaggcccttggggcttcctgcccagcctctgtgacactggttctcacaaagcctggtcattcctggcagcccaggatggcctccaggttgtggctggtctgtcctccagctgcaggttctgcaggttctttctcatcctgcacctcgacccttttccccaggagagcctcctccggggtgggcccggagctggggagaaagaggggtctggtgaccacatggtgccagcagggcagctgtgaaaccctccctgtagccccaggcaccctcctcaggttctaaagccagagctgctgctctcagaagtgctttctgggacttttcagggtgggacaccaggggcctctgcagcagggacccctattgcaggggctgacagtcacagacttgagagcagagtctccggtcttgagcccagcttggcctttctctacggaaaggcttggccaggaggaacgtggtggtgtgggaagaatccgtctggcttttttctcttctttgagggacatatgtctgtcaggcagaagctgacatgtgtctgtcaagctacatgtgtctgtagcttgggggagagtggcttaatatttcatgttttagcccttgtcctcttccagggtgggcttgaaaacgataatgaagtgtacacactgaaaaaacaaaaatcacccacgggttctgaagctcagtggagttctgcaggtgagttttagtgcttctggtcatacagagaaaaactcatgtaaacgcagtttacgcaggctatttagttgctgctttcatctgtgtatacaaaggaacatagctagtaattaagaacatggaggcatttggatctgtttatattttatttgtccactgtaatctttgtgatgttcttatttggattcgaatgctggtgattgctaaactcaagcacaaacacagggtttaagcgaaggttaattatggctaaaatgcttgcgatgcacagggctgggtaaatgagtcaggctgtgtttatcttcggggtttattggtgccaggtgtctagaagcagcagtttgaatttggacatctttggagggaggtttcttggcaaccaaagggggaggtgggaggacttgagcccagaacttggtgccatgcatcagcagagtggctggaactcctttgggctgggatggggaccgtgaaggcagcccttgggggacccagagtgctgctgtgggcatggtacccgtcttctctctgtcctacttctctgggggatgcctggggaggacctgagaaagggaactcaaatttctgtcactgattgaccagcctggagtctctgtagccctctgactgtctgccttcacttctttcttctttttgtttttttgtttgttttgttttgttttgttttttgagatggagtgcattgcccaggctggagtgcagtggtgcagtctcagctcactgcaacctctgcttccaaggttcaagcgattctcctgcctcagcctcccaagtagctgggattacagtcatgtgccaccatgcccggctaatttttgtatttttagtagagacggtttcaccatgttgggcaggctggtttcgaactcctgacctcaggtgatccacctgcctcggcctcccaaagtactgggattacaggcatgaggcaccatgcccggccgttgtttttgagacagggtctcattctgtcacccaggctgattccctgcaaccttgaacttcagtcctcccatgtcagcctcctgagtagctgggaccacaggtgtgcaccaccatgcctggctagtttttaaatttttagtctactaaaacctcatctagacctctagatgaggtcttgctgtgttgcctaggatggtctcaaactctgagactcaaggagtcgtcctgcctcggcctcctaaagtgctgggattacaggcgtcagaccctgtgcccagccttcgctcctttttaaggtttgggtcagctccgaacggagcactgcttgctcaggcctaggatgttttgttgttgttgttgttatagcacaacttacatatttcaaaatgtagtatcatttacaatatcttaggaaaagtggcagatatcttacagtatcttaagataagttgaatgagcgcttcctttccaatactttatttgttgagacagggtcttgctctgttgcctaggcgggagtgcagtgttggcttactgcaacttcaacctcctgggctcaagtgatcctcccacctcagcctcctgagtagctgggaccacaggcgtgtgccaccatgcctggctaatttttttacattttttatagagatggggtctcactatgttgcccaggctggtctcaaacccctgggctcaagcactcctctcacctcagcctcccaaaatgctgggattacagatgtgagccaccatgcctggccctctccagtactttgaggtctacaagatgtatctagaaaatttactactgtgggaaatgaagactacttaagttgaatgggggaaaaggggaagggcctggggtttttccttttgattaacttgtaacattggccttcgcgcagctgaggaagtttcatatattccatagacatcattaagcaccgacatcattaggcccaaagctcttgcaggacatctttgaatgctatatgaattctgccgttttgctagcggtgatttggctcttgggtccaccatgtcgttaggactgttaactccactcaaattaatttttgtcacaaatcttacaaaagggggggtgcttctcagtgtttaggtccacattctattttaaggctgtatatttggctttcataaattgttcttggatgcccagtgatcattcctgtccatcttgtaagtgtcttgtctccatcatcttctcaatcccagctaactttgccatctcctcctcctttctggccttcatcgagttcttacgacagtcagaaattgcgaaggacttttactccccagcccttggtggctgccatcttgtgttctttaccctccaccagtgacttcacccttgggatgtgttttacttacttttcagttgcctcttgtgggaagcaaagagcatgactcttttaaagtcagaaggattgtgcaaattgacccaggacctctgtttcacatttaatcacagaattagaagcccctattcctgtgtgcacctaagcgggcatgcacccgagctggcatgcacctcagcctgtatgcatctgagtcagcatgcaccctagctggcgtgcacctcagcctatatgcacctgagttggtgtgcacctgagctggcatgcacctcagcctgtatgcacctgagccagtgtgcaccctgtctggcttgcacctcaacctatatgcacctgagttggcatgcacctgagctggcatgcacctcagcctgtatgcacctgagccagtgtgcaccctgtctggcttgcacctcaacctatatgcacctgagttggcatgcacctgagctggcatgcacctcagcctgtatgcacctgagccagcgtgcaccctatctggcatgcacctcagcctatatgcatctgagttggtgtgcacctgagctggcatgcacctcagcctgtatgcacctgagctggcatgcatctgagccggcatgcacctgagccagtgtgtatgataaagattgtgaacatctgacatgaagcacagcaagctgttgacagtgatgttatctggagagtgtggtggggagagactttagctttttgctttttgaacttcttttattgttttatttttatacaaatacaattttctaaatctattcttgtggaagaacatgagtttttacaattgtggtaaaataaacataaaattgatcattttaaccatgtttaagggtatagtttagtggcattaagtacatccatattgttgggcagccatcaccaccctccatctcctgaggtttttcatcatcccaaatggaaactctgtacccattaaataactccccagccctgattcccctttctgtcgctgtgactgactactctagggacctcctataagtggaatcacgcagtgtttctccttttgtgtctggctaaaaataaaggtattttaaaagacatttcaatcaaattggtgcagtcattttattttgtttttccttttcctttacttttaaaattaatacacagtaagaatgattatctcagtgtgcatttctgtgagttttaagacatgtgcagatggtgtaaccacgaccacagttagaatacagagaaattctatcctccaagaaaacttcccataccatccctttatattcagctccctcccaatcacttataactgctgagctactctttgttcctatagtttaccttttcaagaatgtcatataatggaaccacgcagtacatagccttttgagattgacttctttcactcaccactgtgccgttgaggctcattccagctgttgcaggtatcaatagtttggttttttttttgtccctcggtaagtccattgtgtgtttgaacagaactgctgtaaacatttgtgtatgagcttttctatgaacatgcggtttcatttccttttgataaatgtccagaagtgggattgctgggtcatatggtccgtgtgtgtttattcttataagaaactgcccaagtcttttctagtgtggcggtaccatattacagtctcaccagccacatcactgtgtacccttaccagcacctggtattgttaagttttttcttaagccattctaatgtatatataatgtgctcattgtggttttaattgcatttcctagtggctaatgatgtaaaacatcttttcatgtgctaatttgccatctgtgtatcctctttggtgaagtatctgttgaagtcttgctcatattttaattgagttgtttattttcttgatattgagttttgagacttctttatatattctaaatacaagttctttgtcagatatgtgatttgcaaatattttctctcaatctttagcttgccttttaattcttttaacagcatctttcacagagccaaacattttaattttgatgcagttcactttatcaatttcccaaatgttgatagaatccatagaaatatgaccacttttatgttgttgatcttggaccctcttgactttgcttaacctcacttattctaagagcttttttgtacaaaaagaaatccttggaattttctacataggcagtcatgctgtctgtgaatagtccattttatttcattcttttcagtttgtgtgcctttcctttctttttcttgccctgtttctttagccaagacttctggtgcaatgttgagaagtagtgagagcacatccttgccttgcttccgactttcggtgaaagcatctgtctgccaccatgaagtatgatgttagctgtgagttttccatagatgccctttgtcaggctgagagagttcccttctaggtttagtttgctgaaagcttttatcatgaatggatgttgaattttttaaatgcattttctgtataaattgatatgcctgtgtgctttttcttctgtgagtaggtggcttgcatttattgatttttgaacactgagtcaatcttgtgttttggaatcaactcccttgggctgtggtgcattatttttacatattactggattcagtttgctaatatttggttgaggatttttgcatctgtgttcatgaggggtattgtcctatagtcttcttgtaatgtctttttctggatttgctatcagggtagtgctagcctcatttaagttgggaaatgttttttcctcctctattttctggaagagagtgtatgtaattgttaggttccttacatgtttggtagaattttccagtaaaactatctctgagccttttcagatgtctttttcagaaggtatttaactacatattctatttctttcctgtttatagtattgctcaggtatctatttcatcttgtgtgaattttggtggttggttgttattgagaaatttgatcatttcctctaagttgttgactctttgtgcacggagttgtttgccatgttcctttttaatgtctatggggtctgtagtgataacatttccttctttcctgatattgggaattgggaatgtattaacatatgaggacctcagggctagtgttttaaatgcagcctctgtgtggaaccagtctaatcaggactgtagtctgtagtcctaggtattaccagattcttatggggctggattcccttggattacatggtaccccttggggagcagcaaatgaggtgccttaggagggacattaaggcttttaagccctggggtagcctttggtgcctgagtggtaagttaataggagctaccccagtgacctgcaggacttcagtgtctctagaagtttcagattgctgcccccgagcattacacaagcattacacaccgggagaatctgggcagccttataccagagtgagaagaaacccgcagccaccacttagaggggggatgagattttcaccacttttccagggtgtttgaggtgattattctgagtggcgtgttgataggtactgatttatttatgttttgtttatttccaataaaggccacaaattagcctgtttgaaaaacccaagaaaaataaggccaaaaggagtggtatgtttttagagtgatgtttaagcagagattgctttgccgtcactttttatttggtgagtcagggactgaagacagttgacggtgtgtccttctgaacgctctgttgtcagctttcatcttaggtcataaagtagacattttttcattgatggactttggggaatttggttcctgaccctgatattgtagcatcttcctatgtgagggaaaaggtcacagttttgtagtgattcttcaagtgagattagttttgcttcacttaattaaaaaatctgtgtcatgctggggtttaaaatagagtgatttatgagcaataaaaagaaaatagatttctgcaaatgtggagggtttggaaatacctgttgcaggtggagtggagtggggttctgtgcaatccctggagccatcctatggcgctgagttttctcagtgatcaaagtcgtttggatgagcaggcctaacaccacgactaccctagtctttcggtgtcttctcgcaaatgattctctttggacaggctgactctttctgctgcagggttgtgtaacgtatgcataaacagctggctaagcacctccagccctgggagagcccttggggctgggagggctgctctccaagcctgaggctgtgggacatgccactgccagctctccctgcttctgctgtgggcatatccttgcagcaatttataagaatcatgaggctgggtgcagtggctcacgtctgtaatcccagcactttgggaggctgaggcaggtggatcacaaggtcagaagttcaagaccagcctgaccaacgtggtgaaatcctgtctctactaaaaataaaaaaattagctgggcgtgatggtgcgcacctacaatcccagctacttgggaggctgaggcaggagaatctcttgaacctgagaggcagaggttgcagtaagctgagattgtaccactgcactccagcctgggcaacagagtgagattctgtctcaaaaaaaaaaaaaaaaaatcatgcgctcccaggtgtggttccccctcccccacccccccggattaaacaaataacacatttcctgtaagaagttcaggtaactcaaaggaggagaatgaaatcaactcctccaccatgtatgtccttatgtaactgatggccctagtctcctttggggctgaattgtaggaaccggatggctgtgaactcaaaggatgctgtggtatagggacctcggagggagcatcagatgtgtgtgttttcacaaggtcatccaggttctacggtgtaaggagccgggaagctggggatgtgaggacgtgaggagaaagggtgggcacgtgctcatacaagtgcaagggccgtgtacccatgtccttgtgtggccaccaggaaggaggcaggcatgatacacgagctgggacaggagtgcccacatctagtcatggaaacttttcagcctgaacaacaagggggacaacccccgttaacttcacacatggggctgtgaatgctgcagatgaataattcagtttctttctgggaggttggtgacattttcgtttctgctctggttgcttgtaaaagagtaacagggccctttttgggccttgcattctggagctggtggctcagaaacttctagttatagagtaacaagaccactgtggggagggagcagcatccttgaaggaggctccgataatgacatcaggctcgtattggtcatcgtcatgtgcactccgaggtgaatgcttgtgacctggtagccgcctccctgctgcacacaaggacaactcactggaaacacagtccatgtaggctgcagaccatgtttccacgtgctgggtttgggtaataattactgtgtactaattgcagtggaaaagtggagttggctgtgccttgagagtgtgcacatgcaggtgagtgatgcttctggagcatgaccttgtgcacacgggggctgtgtgctccctcgatgatgcactgcgtatggtctagacagaaaggtcactcacagaggtcatgggcagccctcggtacatatggagagcagtcaagcatgtgttcacctggcctgtgagtgttagcgtgtcccaggtgttgtaggtgtggatgcctggggaaagccggaagggaaaggccccaggcagccctctgtctaaggttgtggattcttagaggtgttcgaggagcccagaaagaattccagattggcagaaagaaaaggcgtttctgaaaatgagtctgcatcactacgtgggaactcagagcggagtgatcaccctattttttgtacaagtcaggggaaattatgtttgtgtgtgtcattgagcatttcgtgtgcctgatcccttggtgtgtgccccaggagctgcggcactgtgctacggaagcccctagccaggccagggctgcaaactgcctggcgtgcaccctgtgtggtcctgccccttcatggtgccttggacacctcggcttctcactgtgtcacatggtggaccatctcctcaagccccagtgctccagtgagcccaccttcccccctgcctccaagaaatgcaggagtcactcctgacaccatctctagacacaccttattctgcagcatcaccttcccatcggctaaagctggtttcctcctaaacctgtggactccatcttctcctcattccaccttggacttgggcataggcagcctttgaatggagcactggggccacccagggctcacctgtctttgtacagctctgtaagtcatagatatccgaaggcaatgcaaataatccttgtccctagacgtgcaaatgggttcagcctcctggagagacaattgactccccatggaaaaggctggtattgtgtccgttggaaattcatgtcaatattcttttactctgtattatttttttcttgaggtgaaattcacataacataaagttaatcatattaaagtgaatagttccatggcagttagtacatttgcaatgttgtgcaacctctagctccaagacatttccagcaccccaaaaggaagccccctaattatcaatccatcatggcccaatccatccccattcccccagccaactccatgtctttttgtgattctttgacttctcctctgaagggattgtgacacctccttggttctcttgtgagtgatgatttaataatgtttttaatgcatggtcattttttttaagtgacccgttagcagccatcacccctgggctgagtggccagcaatctcaccggatggatggtgctggtttcctggggacttaggcccctcttgtctgttctccgcgggatgcaccggactaagggctctttttaaagtgagaatctggtcatggagggcaaggaggaacattctgtgggcggatcttcccagtcttgtctgtgggtctgagccagcgtgagaggctcttgggtgatatgtggaaatgtgcccccttcctgggctggtcctctttgcccctgacaggttggtcagtgagtattggttaattattgtgtgctcagtgctttgtaaagcatgcgagatgtttatagctatagagaggacatggtgtcaaaaacagagatgcatccaaataaagcaagcaagctaatataatttagagccagcatatgcttgcattagagatgtcactgtgggctgagcagagagcaggaccctcgccctgggggtgctctccgcaccctccccccacaccccgtggtaactcaggcttatccagccctctccaggaggcgggggacccctgcaaccctgcccatttcctaatggacccaaagaatgaggatgtggtttttgtctagcactcacctctctgatggttgacctctgtgactgcctgagttgctgtcagtttcccctgggggtgcttcactctggggagaccagtgggttttgaaccctgtcctcagtgtccctgtcctctcctttgttcccatgatcttgcagggagaggacctgttgctgcccttcctagctggggtgttgcaccccacatctgaggggtctctccttattgatgaactcctgtcttttcctgtccagatcctgggcattggggaggtggccagaggcagcctggctgcgccctgctgctggacttgtaatgtgttgccccccacccccaactgtggctgccttgcccctgaggtcctcagccccaccccagctgtttataatcatccgaaacccaggtcggaaggcaggatttccagccattccttttttctcacaggtagcatcttggtgaaataattcaatttacaattaagtatttttgttttacatcttcaacatgattagaacaaagtgtccttggtccctgagagcgtagtgcatctgagagaagagaggaagaaacaggctcacagtgcggttttgtggcagttttcttgggggtgggggaaggtgagtcacactctccatttttgactggtgttctgattctgaaatttaagaaaagcacatagaaccccaaaagcacgtgtctaaggtggaaagtggagaaagtgcccccatgactgcaagggttgaagttaagcctttggctctagttggcacgatttggttctttttttttttttgtctgagacggagtcttgctctgtcacccaggctggagtgcagtggtgcaatctcggctcaccgcaacctccacctcctgggttcaagcaagcctcctgcctcagcctcccaagtagctgggattacaggtgcccgccgccacaccctgctaatttttgtatttttagtagagatggggtttcaccatgttggccaggctgatcttgaactcctgacctcgtgatatgcccgcctcagcctcccaaagtgctgggattacaggcgtgagccaccatgcccggcccaccatttggttctttaaacacaacatagagaccttgtgttgtgaatacactttggagactggttgacgctaattagttttgtacctccccacctctgctgcgaaaatgaaaaagcagcagcgaaaaagggctggtcatgacctggatgagaaagagcaagtctgggacttgatcatgaaaagcccccaagtagccctgctgaacagatttagcacctgggaatggacccctgtctacgaagaggaccagatggatcatgcaaaagatggctggtgtgagcctcaggtagatttttagctcagaaatgaatgggcttggttaataagctgggttaaccatgttccactgtggctttcccactgcaaatgcagggagcagctattcaaagattctgaaaagaatatagtagcaggtggtttggggaggaagattagaattgcaagtattcctcaactgggcatgagtctaccatttttccccatctggtattccccagtctgaactcaacacattggaaacctggaagtgggtactgggatgcagagaagagagtgccagaagccttctaggtttggcttaaggagtagaaaggaacattctagtgttcagagtacagacccttttgttctgtttcccttttctgtgttctcttacatgcctctctttctccctcgctcccctcccctcgctcgctcccccctcctttctttccagcacagtcttgctctttttcccagctggagtgcagtgacatgatcacagctctctgcagcctcaaactcccaggctcatgtgatcctcctgcctcaccctcccaagtagctgggactacaggtgcatgtcaccacacccagctaattgttttttatttgtagagacaggctctcactttgttgccttggctggtcttgaactcctggcttcaagtgatccttccgccttggcctcctaaagtactgggattacaggcacgagcccctgcatctggctgggacagctttaaataggaggtgttgttggcttgttgttgttttgagttgtttgccgtagactggtattggggaatttttactccttcaaattgaaaacattccatcattttgccaaaaacaaccccacctattttgtacagaaaacacagctctccttaagtgggtatgccacagggaaaaacatttccacattttatcagccggttgcctgccgttgctcacatcaatgttgttataaaggaagagcattggtggccacttcccttggagcctgcttctctgtagaagctagccttatgggcttttgtgccatacgttaatgtacagataataatcttagttactgtgaattataatagcaccgtatttaaattctggactgagttagccagatgatctatacctgtgagaaatcaagtttcaagaatttgcagtgcactcacaccaagcgatttctggcatttctttctgggtgtgcagaccaccctgggcagagagggagtgattttagcttcacgtgcttcagttagggattcagcaaagcctgagaatttcccttcttaacccaaaccacgtttaatgcatcactaggaaaagcaggttggtaaaactcatcctagccttaaaattacccatttgttgttcaagaaatatacatcaggccaggcacagtgtctcatgcctgtaatcccagcactttgggaggccgaggtgggcagatcatgaggtcaggagttcgagaccagcctgaccaacatggtgaaaccctgtctctactaaaaatacaaaaattagccgggtgtagtggcgcacgcctgtaatcccagctactcaggaggctgaggcaggagaatcacttgaacccgggaggtggaggttccagtgagccgagatcgcaccactgcactccagcctgggagggagagcgagactctgtctccaaaaaaaaaaaaaaaaaaagagagaaaaaagaaatacacattggccctaggattcaggcttcccaggactctgggggtttatgatgtccaggacaccatgatttctgttcatatgctactctcctagtataggagaaaaatgtttggaggtttattctggcagccttcctgtggtgcccacacttgtcctgggagggcagtgagtcaccgttgcctcctcagttgtcaggactcagaactgcagccatttgctcatagccatccatgtgaaagacgcaaacatacaatttggagccagagtgctgctttatctattgacgtgcttctctctgtgggggcgcttttcagtttcacagtcaagagtatatggggtgaaacgttttgttgggattaccggtcccaatttctgctcgttgctgatagctaagaggtacccttgtaaggttcctgatatccctggcatgctgcttgctagaaaagtcattgacagcagggaggggctcacacttccacaccaccttaagccttgtaattattttttctggtcattttgtagggggagagtggcatcttgctttaatctgcatttttctgacctccagtgagatgcacattttctttcgtgtgttcagttgcagtttgcagtgatcttagaaaagagaccttggggcttcatgagtgtgctgaggggcccagcagagcccccgagcatgactgtaggattaggtgatagggttgtctgccctgggagccctttctctctgctgcggggtgtggggaacagcaggtcgccttctccgtcctccccttcggcatatgtggtggccacatatgaggctaggtgtcattttcagctggccctgctaagccctgcctgtctgcaggaggagggcagcttacacaaaatgcccagtgtgctgagttccacgctggagggcatgggttctcctgggcctgtaggatgcccgtgtctgtgaggggtgtggttcaccttcagtgttgcttctcccctttttccttgctctgcggcctccaggaccagctgtgcatgtgaggctggggtatctctgacatattcttgagccgtctcatgagcagtgggtctgaaccggtggaacctcggttaaacatgtgagtaccggtcttccaggaggcagaaatcaaagctctcacctgtgcatccattgcatgagtgtgtgacacattttggagtttcaagttgtttgtaatcagtaagcagttgtcaaatataaaacaaatccagacttagtaagaagaggctttcttaggagtatgcaaaggaaggaatggactgtcacagtaggggccagggcctggccacatgctgaccatgagatcacatgtgtctgaaaggttaggccaaagggcttttctttgtagggtggtgtagatgaggcttcgaagaaccagaggtgggatatgggatgaaggtggcagggtcaaaggatgccttacccaaggccagctgtttctcaggaggggctgcactggctctgtgggacccaaggggcctggagaaggacagaagcgaagcaaggtttggttatgagcattttgttgtgagtgatcgggagcaggcgggggatgcatcgtgccactggccatcaagaggcacagagcaggcgttggtgggtttctgtgtctggccttatcctgggtgggtgggggcatcgtgagccttagctcagtcctgtggggaaggggctttttttgtagcagttgtttctggaacgcagagggcaggggatttcttacctcctgctgttttctaggagcacttgacattgttgcagttgtcacccagagttttacacagaatagggtgtgttatttagtaactgaatgctggcctgggctccctcgtgttagccacatgggccctcaaatcttagcctgggtcttgtggcgtgtgggcctttctgaccagctgaggaccttggtccctgcttctaggtaggtggcatttgagccaggtggagacaggaaggaaggtgcctgccacacacaggggcagcccccaaggcttgcagggaggatgagggtcagccccctttgggacccagggctgagcagggacagctgcagggaagaggctctgggtctgcagggggattctcatctctccaggaggataagaccctcaggaatgttaataagactcccccccaacacccttgtaggctgttgctcacattgacatgctcttgccttatcagtatctcactccctgaaatgactttctccagttgtttctttgcgtcctcaggagagccagggacttttgatgcagcttggcacacaaaagaagcaaaaagcattcactgacggaatgaatgagccacatccaaaccctgactcccttaagctgccccagggactagaggctgttcactggaactacagcaacatcacctgagggcccattagaaatgcatgttcttggaccccccccagagcactaccggactggggctccaactggggcccagagatctggcattcagatccttgccaggggttctgctgcaggccgcagtatgagaaccactgaccacaggcacatggggtctctaggaggctgcgatggctcagaacctgcctctgagctgctgaggaggaaggaggtgattctttccccagcgtgtgagtgggtgggaatgctgggctgcagctcccttggggagaggataaggaccatgcacagtgtgtgtatgagtatgcatatgtgtgtaggcacatgtgtgtaggtagatgtgtatatgagtacatgggtgtgtgcagtatatctgtatatgagtgtgcgtataggtacatatgtttgtgcatgtgtttgtgtgtatgtgtatccatgtgggcatatgtatccgtgtgtgtatgagtgtgtgtttaggtgtataagtgtgtatgtgaatatggcatgcatgtttgtatgtgcatatatgtatatgtgtgtgtgtgcatgagtgtgtatggatgtgcgtgtttggatgtatatatgtgcatgtgtatgtatgtgtgtctctgtaggtttgtgtgtgattttgtatgtgaatatacatgtgtgcttacatgggtatgtgggtgtggtgtacctgtgtgcataggtgtatacgtgtgtgcatgtaagtgtgggtgggtgtgtgtctgcttggatgggtgtgtgcatgtatgcatgcatgtgatgcatgtttgtggcatgtgtgtggcatgtgtgtggcaggcagtcttttaggtgggcccaggaagggaactgtgtgaccagccatgggttggccttccgtaggatgtatgcaccatgtggaatttgtagtttccactaaagaaaaggggcggtgctatgtgggcaactgtggtatgtatcggttgcagtgtgcagggtaaaaacagccctaatacggaagctcagaaatgcagggaccaagttgccttcggatccccaggccactccacagcacgaaaaacctgttactactctctggactgtcctcccaaaagcctgtgtttcctgcgcagccactcacatgcatacgtaaggccaccgtggagtggtgggcttgccctggctcccctccacagcctgcctttttattctgtcttgggcagttccctttccacacaaggtcacctcctcagggtttgttttttgttgtttgttgtttgtttgtttgagacccagtctcgctctatcgaccaggctggagtgcagtggcacgatcttggctcactgcaacctccggctcctgggttctagtgattctcctgtctcagcctcccaagtagctgggactacaggcgtgtaccaccatgcctggctaattttttgtatttttagtagagatggggtttcaccgtgttagctaggatggtctcgatctcctaactagtgatccacccaccttcggcctcccaaagggctgggattacaggcatgagccaccgtgcctggcctgttttttgtttatttgcttttttgagacagggcctcactctgatgcacaggctggagtgcagtggcacagtcatagctcactgcttgacaacctgggctcaagcaatcctcccacctcagcttctcgagtagccgggactacaggcatgtgtcaccatgcctggctaactttgttttgtagagatggggtctcactgtgttgtccaggctggtcttgaacttctgggcccaagcgatcctcccatgtcggcctcccaaagtgctgggattacaggcgtgaaccactgtgcccagctgacctccttgttctttgtgatgggtgcatacacttcagtgtttggatagaccatttatttgattctggtcagccactgatggacttggaaggtttccatggctttgctacgatgcaggaagcaccctcatggtgtagctttgtgtccaattggaatgtgattcagcagcatcccgagcgtcacagtcaggtgcactgggtctgctccccccctgtcaggcgctggtttccccaccccatcacaggctctggttgctccaccccatcacaggctctggttgctcagctttgtaggttactgctcatcagaaagatgaaagcgaccatcctgcttcagtttgtttctttcatcgttaatgacatcgaacagcttgtcccttcagttgccatttgcggctctgtgccttgtgggaggggactttgcgatgctcactccctgctccaggaggccagtgaggaaggaaggagccctttgcattttctcagagtgttgattcatgtttctccttaatgcaggggcattagtaagccttccgctacttctgacattatttaaaaaaatccctcccagctggacgcggtggctcatgcctgtaatcccagcacttagggccaaggcgggcagatcactttaggtcaggagttcaagaccagcctggttaacatggtgaaaccccgtctctactaaaaaagatacaaaaatcagccgggtgtggtggcatgtgcctgtaagctcagctactcaggaggctgaggcagcggcagcagaattgcttgaacctgggaggtggaggttacagtgagctgagatcgtgccgctgcgctccagcctggagacagactgtctcaaaaagaaaaactctcccaaattctggttcctgtttggattcttcttttcttctctctctcttccttgccctccttctcctccccttcttctcctgattttggtttttgagtatgtaattaattttaaaacttaaaaagtgttggaatattgaatgctagcactgacattgtcttcatatgtgattttaaattagggactgttttggagctttgtactacagtgtccttcttgactacaccttcattgtgggtcacagggtttctgggttaggccttggcccaccctggctgcctcctgcactagagctcacgcctagtgattgtgtgctgagccaaggagaggctctctgctaagttggtgcctggccaggagcagaggggaggagagagatgggtagggtgaaggaaggtgcagatgatgcctccctcccagttcttgataatccttgtctgttagctgtgatgcctcctctggtctcacgtggccaggtaagctgtatcctgtaactgacagttctctaggacgatgctcttgcagtccctgggggacatttttcgcacagggttggggtatggaattgtgtgtatgtatattgtaagggaatctggtagtttatcctgctaaaatgtgcccttttctaactctgtttcagactctgctaacaccagatagtggaaagaaaccatgtgctgaaatgtttgacgacactgatggtttggtaagtgtcggcgtctcggcgtctgcctgagagccatggttccttttggaactggcttttcagaaggtcttgtcccggtgttccattcctcagtcagcagcgatgcccattcactgtgtgacctgccaggcaggtgtctggaaagtgagggaggaaggcctgtctctgaaagctcaggtggttctgcctggagtggtaagggtcggtttaggggatgtggatatagaggaagtcagagtgggtggggcaggggaggcaatgagcgaggcaatgctgagtgtggcttgtttggtggtgagcccagtacccagcctcagcaccagcttccccggcaggaagggaagggccccagttgaggaggtgcccctgcctggactgtcccctgaggactggtgcgcctaggagttcatattgggttgttgaaggtggtctttcacccgaccctaggggtcttcgggatctggtgggcagttgcttctcttctgtccactaactcacaccccccatgccccgtgttcagggaggtctggcaaaggcagtggcttgggctggggtgaggtggaccggggacagccccctgggctgccacacctttgctcccacccctgcctttcaagtgtgcagagtggacgaaggggctgcttgttgtctgaaatttcagagcatcaggccacacgggccctgtcacagacagcatgtgggtgcgagtccgcatgtcatggcagccccaaagggcactgggccctccctgtcatggatgaggccatggaggcacagcgtgatgaagtgatattgttgtaggctatgacccaggctacccgttttctctggccctgtccccaccccctcccaactgttgggatcgggctgcctgccctgcagggctgctgggccatgggctggcccgtcacttcatgggttcagtttccttctctgtaaatgtgaagaggcagagccacccggggcagcttcctcgaggggcggggcttcctcacccgtgctaggcacacgcctgggcagagtcctgtgccagggccccactgggtcagctgggggctgggagtgctgtggcgtggctgtgtctcttcgccaccccgagggtggcctgggctggcatgggacatgtccttgcgctgtgcaggattgtaggctctgggggactcaccctgtgcagaatgctgccctcacaccctgccgtcaccgtgggacacccactgcggtttgacactctcactgggtgtgggaagtgccctcggtagccccaggagggaccgtcttcggccagcagccacctatgcaggtctctcgtttccggcttgtttacgtgcttggatggaaccagaagagaagaggtcatcagaagaagctgctctgtttgatttggtggagggcccacctgtccaaggcccccaaggtccactcctgctagatctggtgtggaaatagaggagggagtgaaaatctggggggggctgaccatgtcagccacaccaagctaggggagcctcagccacgtccacaccaccttctgtggccactcctggagacatggattaaaggttgatgcaggtgtgtctgtgttagaaggcgtttcaagatgtgactttagctgtaagaggcaggatatgtaagtccttgcatcccctttagaaagccgggttgtgactcctactgcctcaggggtgccttggccctcctggtcttgcccaggctgggatcttcctggatgcagctttcacatcatagatagtctgcatacacaagaccatttgcaaaggacatactgaagattaagtcatatattctatcgagaccatcctggctaacgtggtgaaaccctgtctctactaaaaatacaaaaaattagccaggcgtggtggcgggcgcctgtagtcccagctactcaggaggctgaggcaggagaatggcgtgaacccgggaggctgagcttgcagtgagccaagatcgcgccactgcactccagcctgggcgacagagcaagactccatctcaaaaaaaaaaaaaaaaaagacatatattctagaacttgggttgaagtagaagcaaaaataacttttaagggacttttcccagcgtgaagtggcccatataaggtgctttgccagcctttgtgtggggacaaagcaggcattgtggttcccggtgccactgtgggccaggccctgtgatgctgagtcctggagacagcacggccaccacaggaacctgaccgtcagggctgtgtgtccacccagcgagggccgggaccagatggttctgggaggcctggcttagattggtctggggtactggggtctctactgcaggcctgttggacgtggctggaaacacggcctgggggccatcgccttccagcagcttcccctagaagcataggataagacaggcagcaaagggctctgcgtcctcagagaaaggagcacaggttggcttggacatctgtctgggggagccagagagccacaggatacaatgctgtgtcttgcgtgtgatttcttagacccaaactcttacacttgcatgtgcttatggggagttgagtgcagaaagtgaattcctttgagtttggtggttgttttgataccgcctgcatttaagctcttccttcttaatttacaacaaccctgtagtctttataaagtgcactgtgtgggtgctgcccagcctccctagggtctgagtgtgccccactgcttggaggcagggctgcttcacctgcactgggatggagccctgttcataggagctgggctttatttttagcagatacagttccacgtctcacagagttgagagcaggaagactgtagatttaattaaatgacactgaaaggggaggtaattacttctgcatgtttcaggaggcccaggagggtgtcccaggtcctctgctgcagccctgtgaggctgttacctggaaaacacccaagatcccatccctgatgggcactcagggtcctgtgcattactctgactaatgatgaacaatgtgagctttcctctctgaagcctggctttggagataagccatgcagtctagagacagtgcagcaggtcacttcagaggaagcatggtcaagccgtgcatcccaaagctgctttaacaggacgggacacctggcgtggtggctcacgcatataatcccagcactttgggaggccgaggtgggtagatcatctgaggtggggagttcaagaccaatgtggccaaattggtgaaacccccatctctactcaaaatacaaaaattagccgggcgtggtggctcatgcctgtaatcccagccactctggaggctgagataggagaatcgcttgaagccaggaggcggaggttgcagtgagctgagatcgcaccattgcactccagcctaggcgacagagtgaaaaggctgggtgcggtggctcacacctgtaatcccagcactttgggaggccggggctggcggatcacgaggtcaggagattgagaccatcctggctaacacggtgaaacctcgtctctactaaaaatacaaaaaattagccgggcattgtggtgggcgcctatagtcccagctgcttgggaggctgaggcaggagaatggcgtgaacctgggaggcagagcttgcagtgagccgagattgcgccactgcactccagcctgggtgacagagcgagactccatctcaaaaaaaaaaaaaacaaaaaaaaccaagacaggacatagagggtactagcaccatccagctgcctctggcacacaggaggggccggtggccaagggttcatttatagtaaccagaagcttccacaccctcaacacactcagatccatagcacctcctcctatcagtggctgtgtgggtggtactgcctccttatgcctcataggatccctgcttagtatcctagctggacaccacacctgatacagagcaccagaagtgtgctgatcagagccgagatgccttgagcagttacaaagagtttgcacacagaaggcaagatgcactaccttgttcatgacctgcgtgcatgacatgcagaaggattgtattttggatgtgtattgggttagataaaatatattactaaagcaaacttagtcttttttttttaaatgagcaaatccaaatttattttaatgtcatttcattttcaatgtgtttaaaaacctcataagttagtgggagccctagtttcctgggacagcatgccggaggtactgaaatttgtcacctttctctacaaagtcccagcaatccaatccaaatccatagcttcagaaagccaggagttttatcttcagtcagtctactcctctggttcttggtttttctttcaagggagggagatcacaatatttcaaacagggaacaaaaccagttgagcttccagctcaggtttgtgtaagatggagtgagggaagaccccattgactccagagaaaagggtaaggttgagatggattatttctttatagctttgtgaaaatggaagaaaaaagattgacaaatgaggatccatttcatagatgggaattgcttcataagtgaaggctccagctcctaaaatgggaggggcctgactgacagcctgaatcagatgaggagtcggccacaccgaataaaaactatctgaaaaataatcctcctaattttgaagccagataaaatacttggggagaatggaaaaagaagaaaaagcccccaaatagatggaaaaatgctaacatcagaatggtataaaaaaattcggctgagttttcagtggtggtggctaatttagccctgttctatcgtagggttacaaaccttgaccaagcagagagtagaagaaaaggctaggaagaggggcttgaagacaatgaattttgactcctgattttattatttaatttcttttgttcaattaaagtcttctgtggttgggaagcctcgcctcccaagaccagagtcagatggagctggttgttgttggaagggagtgggttgcaaaactggggtggcggcagggacacccccactctgctggcagtcctaggtggagaagaactgcacttcacagagtctagggtgtggtgggaaggggatgaggcaggagcagcaagctggggagatgggacccaccttggtccccagcttcattttcttctaatgtttccccactggtggcattctctgcagtcttggaggcctttttttttttttttttttttttttttccctgggtttttcgacttgcagaactctggaggagggtctttagctctgcatcctggaccttcatctcagacttatagaggtcaggctggaagggaccactggttatctgcatggggccattgggcaggagcagaactgtaaatttaaactgggcaacaaattcaccctccttctcatagagaacattaaatggttgcagcatttcatgtttggcgcactccaccacacccatccaagccttcttctcatcttcacatgctcttgaagtaaatggcatggcatcaaaacgccttttcatgtcactgaagaaggcatgtcaagttttcattttcagtccatactgtttggaggggtctcatttgtacatagtggttctctctcctgcatccttggtcttgccctttcctgagctgatgagaacatccacagcatatacttcatgtacctcaaattcagctttttcatggtccttcttctgcttgtctgtgggattctgggtaatggttttttctccatcgatgacatgctgcttcagctggtgtgacagcataccttctattggcatgcagttaaataagtgggcaactttgttccaggcttctgtcacttgtgtgttctgatttccaggtgtgaccaggcatagggcagcttcagcacaacggtgagctgccttaataacatctgctttcctccctgttacttgggtcccctgagctacatcagtcagaaaagtacgagctacattagtgatgaagccattcacatggaccccaaggtcaatttttaccaagtcaccttccttgagaatataatcctggtctctcttcaaaggggagaagtgacatacacagttatttaccaaaatgctggtgggaaaagcaatacgtttcttcatctctttttctttcttgaagattttccctgtttcttgcataatcacggcatcacctttctcacacaggctcagtactgacacacctgagctagatgcgtccaccaaggaccgaagtaccccattggcaatgtcgcccccccatcttatagttggtcacgaccaggtcctcggcgatagtttgctcctgctgctcgtctttgcctgacatcttcctgccaccaccactgcagcctcgtttcccctgagccgccgctctgcctcccttcccagccacaggctgtggtcagagctccctcgatcctcgaggagagggcgagcgaaagccgcgaacttagtcttttagcgtgacttctaagagcatctgaaattatacctgtggctcgcctggtaggtgtaggatctaaactgctctttggtgcccttggatttgacttcctctcctgctcaggccccgcctctgtagttgggagctagtgacttgtaacaaccgtatcaggctttgagagtgtttttagccagctttaagtgctattattttgcatttttgcagacaattacaaaatagcctgctgggccttagcaaatagccaggtttcaccactgagattgtacatctgccgggctcccgggcctgtgctttcagtgagcatacccctccccaaaaggccccgtgctatccgggcttgtgtctcccttgttttctgtgggtaagacttacacagtgtatttgccactgattttccatgtcccagctgtaccctgaatgcatcaatgggcgtgctcagcctgcaggtcagtgatggtttgtgatgagccccatcctgccttcccgtgggaggagggtccccacgtaaccctttcaggccctgaccttcacttgctttggccacccctggggtcccactgaggggctgctatctatgcagctgcaggacacacgctggagtcctgggaaaagcccctcaggcacttccacatctggccgggctatttatatccctcaaaatggcccatttttctttgcagagagtgaacatgtgggcaatgctgtcatgcccgccagtgaagcccgtgaaacaagccctttcattgaatagctttctgggtgcgtctgacacattctcatctatgtgcagaggcctcgtggttttacgccttctctgctgccgttgtgtggatcgctgttcctcagagtgtaggcgggctgtggcccccacggcagcctgttcctggtgctggggcagcccagctggtctgggtaggcataccttgcctccctgtctctatcccacatcgcccaggggagggtgggtcctccatggcctgtcatgcacagttcactgagctcctgccctgggtcccttatgcctgggcagtggggcatcagcagaggaaatagtatttactgttggggcagacagaccccaaaggagatcaataggtcaggtatgactggagttacaagggggagaaataaagcggaaaaagatgccaggggcaatggcttactcttgtaaatcccagcactttgataggccgagatgggaggatcacttgaggccaggagtttgagaccagcctgggcaacatagtgagaccctcatctctataaaaatatagaaaatcagccaggcatggtgaaatgcacctgtagtcccagctgctcaggaggctgaggtgggagtgtgacttaaggccaggtattcaaggctgcagtgagcttgtaccccagcgtgggtgacagagcaagaccctatgcaaataaatacataaaaataaaatacaaataaataaatacataaagcagagaaggagatgagacgggttctacaaggggagctgggctgattgatggagccaaggctggcgccatgcctgtgcctggggaggagcaccgtatgcatggggaacaaaggagcaaaggccctgagacagataggagcaagtcttgggtgtccagggagcactgaaatggtggtggggggcagtgggctgaggcagagtcaggaagggtaggggtaggagaggaggtggtgggtgggggagtttgaggggttggggaagacccctggcttctggggaaaatgggccattgtgggggtgtcgggcacccggttaggctgtgaggtggtctgggagagcggtgctggtgtgggcacggtgcagcaatgtcgatgaggagtggctcccttcagcgcttatttgaaggtggacccagaggacttgctgccagcttggatctggggtgggtcatggtgggggtcggggagcacagaacaccctggattttggcctgagccattggaaagacttaggctccaagtgggcttccacctgggctgtctcggaggcatctcagctttggggaggtgaggagcgtggtttggggacacaggaagcttgaggtgcttattagtggggaggaggctgtggggtacctaagcctggagttgaggaaacatctgaggactagcccaagggttagtcctgactggagccggggatatggaggtctcccagggcaggccccctcagaatgcccttgctcctttgctgtcaggtagagacatgtctgaacctgctcctgttccatgctggcctgcaagggtcacaaggagagacaaacttttgggtgcctccatcgagattggaaggaccgataggcagcgggcgagggagggtcggggttcggactggctgctgggctgcggtgggagagatggtctgggcctgggagatgagatggacagacccacaaggataggacacatggcagggttcggaagggaaggcatctggagaattgagggtctcctcttatctcctgcagtctttgggggcagcacctatcccacaggggcacgcccagctgagacttcgagtcctccgagctggacacagtgtgggcagggagcccgcctgaggcctgggtgcagcgtggtgtggggagtggaaggcacgtcctgaggggagtcactgtcctcccccgccagtgtgcctggcacataacccccctttcatgcctcagtctcctcctgctgctgccttgttttagaaggtgtggccaccagggtccaggatggcccacacccctgctgaggggaagcgggaagcggctgatcctttgtgcagggagcctcggagccctggagaagtcctgggaggcagcctcccctctctgccctccttggtggcccgagagaggccccgtggtgcttatcatggagacgggatggtgtttcttgttttctttagcccatgttgggctgggtggggtcatggccttggagcaggccctgttcagagccactcagtcagtctcagggttttttttgttctttggttttgccccttgtggtaggccaaatgatggcccccgaaaataccaggttctaacccttggagcctgagagggtgactttatatagagttagagtctgcagctgggactaagttgaggatcttgaggtggggagatgattctggactatctggtgggccccaaatgcactcacaagtgttcttctcagaggcagcagagggagatcgggcacagagggcacagaggctagagtagtggtgggtgtggggtggattttatctgccaattgggctgggcctcgggtgcccagataagtggtcaggtgctattctgggtgtctgtgtgggtgttcctgggtgaggttgacatgagaatcggtagactaaggaaagctgttgcctgggaagcaggatggacagacctgcagggatagaacacatggcagggcctggaagggagggggtccgggacatgagggtctcgtctcatctcctgctgggggtgcagtgcttgtcctgcatggcacctccagctgagcctgcagagacctctgaggtggacgcagaggctgggagcatgggtagggaacccgcctgaggcctgggtatggcgtgcaaagtagaaggtggggtaggaggtggccctccccagagtgagttggcctcacccaatctgtcgaaggccttaatagaacaaaaagacccggcttcccaagtcagaggggacttcggctgtctgactgcctgtgaatggaagcttcacagggtctccagcttgtggatgacagatccataatcacgtgagccgagcacataataaatctctctctctccctgtgcacatcctattggttctgcttctctggagaaccctgactaaccaaagaaccacaaagcaaggaacgctgctgccaccagaagctggaagaggccaggaagggagtctcccctggggcctccagagcgagcatggtcctgctgacaccctgattttggtcagtgaaactgatctcagaattctgtcctgcagaactgtgagggaatacacttctgttgttgtaagccacccagtttgtggtcactggtgagagctgctgcctgaaaaccatacaggcagtgtaaacagtgcttccgtgaataccctggccatgctctggagctgtcattcagtgcatgggtttcagggagcagcactcacggtccaaagagcgtgtgtctcttccttgtaatagatcttgcaggatccgtttctgaaaagatccaacagttcatcctttccctgtgagcacagggagctccctgttccagcaccttctttcggcggtggcatgaaacactataaactgacttgtcagtcttcaagggcagagtgacagctttgtggccttgatggtgtcaccccagatcctggtgagtgtcgcatccttgttggatattctgtggccgtttggatcttctgtgaatcgcctgttgtgtgttgtgaccctgttctgtcgggatgttcagccctcttttgccaatctgtaggagctctggatttgttatagatattgatcttctttcttctgcttggaaaacgtttattcctaattcttttctttgccagtttcttttattaatgtatcatttgctgtccagattaactcattttatggtcgaatatgtctcttttctcttagggctcgtgggtaccagcgtttgttaagaagattacatgggttgtctgaggattttctggcaggagttttcttgttttgtgtgtttgaattaaactcttgaacgtgtctagaatgcttttaacatgaaataatatgcttggggtgggggagggcaattttgtttccttccagtgtgccagcactaattagtcaataatccgtcctttgaccaatgaattgaatgacagctctgtggtctgttagggtctcatgtaaactgggttccgtctggggatcctccatcccactcgctggcctgcttgtctcttcacgtgcccacatcccgtcagtagcggctgcagagcaagtgctgatagctgggaggagtcccctcatgtgctgtgtgtgtgatgacgtgctttgtgagccgtgatggcaggagtgctcctgtgtatgcctgtatgtgtttgcctgtgtttctccttatgactcctgggcagagcatgataagggtgggtacactgtagctgtgctagaggggcagccagggaggaggccatggaggtggggagggaggccaaggtgaagcaggaaaacagagaccaccaggtggacgcagaattatgtctatggtaggtaggtataatttctaaaaggcaaggtgtctaggacaataaatgtaaagcaggtttattatggggggagcagtgaaaagagaacccttcgtgtcagggacccacccactgcttggatttcctttgggcatgagtgccctgactctgcccgtggtgggaggatgcatgggcatgcagtggggtgaccgtgtcactgcagcttaggtgcctgtgcctggcccagggctgcctgactctgggcccctgaggatgcccatgcccaggcacctctggcagctggcacctcgcagtctccaaatgctctctgtgccccatcttctgtggcactgctttagcagggcaggccacacctatgcagggagcccaggaggtcagggcctgcagttacccactggtgaccccagccccacccatgctgtggagggagggtagagagtttcaggtgccagcccatacaggactcacagccaggacaggaggcagccaggtcctggccaccagctcggaggcaggcatggggtggggtgcagctgagcgctgcagggccagggccgtccgccacccgcctaccccaggcagatcctcctctggcggctgctgctggccggacctgcttcccgggtggctattatgggcgggtggagtccacgctgtgctttactgggagggctcattttctgtcagacagctgaaggctccactctgcagggacaacaggaccgtggtacacccgcttcgaggtcagtgagaaggtggacagggcagccaggccccgtgggaaggtggctggagactgggcccatgggcatcctggtggccctgtttaagctccttgttcagcccacatatggcttgtggctggagtgtgtgtccagttgagcactggcaaccgttcttctccagagcacctcgcgacccggcctccgtccaggggggtagtgtgggtggtcataatcccgccactgacagggaagtctcactcttgaagctgtggagaagtccctaggggacctgatggggctgggctctggactgtgagtcacctcctggggagaagagccgccttcctcctgggcggcttcagtcccaggtcaggcagaggctgtgcaggcatgctgtaggggtgcagggggccctcctgctgctgagcacggtcctggtgggcatccgaggttgctctagccccagtgaaggcccttaaaagtctcacaggctgtgtgatgacaggcttgtcccagcccaggcccggggcccaggtttgcagacgacaccggcacatgcgtgaaccagggtccccagcattgactcacatctgcccgggtctggtgtttcctcgctgggaaatggtgagaaggatggggagggctgcagccatgccagacactgtctggtgctgatccctctctgggacggatgcagttatgaaccccaggaaccctcccctccccttgcatgtatcctgacagctcagggtgagtgggtctgattctttgctagctgttggggcctgtggaagtgaaactcattgtcttttccatttttaccttgaactctgtgtttctagcaagtagaggaagaggaccccggccaggcagatggtttatttttatgcatggtttcagatggcgcccacccctcctcccctccttgctgctgaccatctcactcttttgacatgttgctgctgctgcatggttttcttacaattttttctattccactgcattttaactaatgaggtccgtattcttcctgcaaagctgccatgtttaacagaggactcttggagcctggcaagcttggaaagagcaggtagctccctcctcttctgacaggcgggccagtggggctggagtggggggctccagcagcccctaccaccctcgtggcagccgtggtgcccagagccgacccactgagcccctcccagtgctttggccagtgaccttgacctgggccgtacggcgcagcaaaccatgtctctggcctgaagatgtgtcctgggccaggggaaaagggaaggaaacagccccagctcactgggtgctgatgatggggaggggtgatcaggaacatgctgaactcaccagcctggccattgctggtctacacatccatgaactgtgcaagatttcaggcacgttaaataacagagccttacagtccaatggggaagagaaatgtgtaaacacagccatggggatgggtgcctggtgagggactgtcaaacatgggcgtggccatgagcccctcttgccagcctctagccctctgtccacacggtggggcctggagttgctggacttccctttcacttagatcagaagctgaagtttaacagtgtgggctgggatgggagtgtgggaggggggttagggcccaggcaggaaagctggacgcagagtggttagacaggtattggggctgaaatgacaaagagggtactgaggacacccagggacaaagcagccacagcctccaggcaggtcccaggagccctgaggaggagccatggggtggtggggaattggtcccctccctgcctgctgcttccaggctgccctcacttccttcccatggtctggggcattctgatcctgacacagtgatgtgggggtggcccatgatgtgggaatgggggcctggccggtaccgacatctccagccagagctcagggttgcctctgccatcatcacctcggccacatcccctttccttctgatcccagacacattgggctctgtcttgcctgctgttctgtctgcctggaaagctaatgttgttggtgccaaattcctgaagagtcctccctgatggcccgtccaccacgcgaagctgtggaaattgcccgctgctgggaggaacagtgccgcccggccgagtcctgcgcgtgtgtggaagcggaggccaagggttggtattcgtaaggtctgggagtttggtttaaggcagatctttcaatgtgggtggctggtctgatttggactgggacatgtttacaatgtgtaataagactttaagatcagtggacgcagcagagggcgtgaagccagcctgatggtggtttgctgagggagcagcttgcccaggagagtggcttgttgttcttagaaggactccctgggtgagcaggtcaaacaactttcaggagctctgatcagtcaagttgcatgctgttttgccctcttgggtggaaatttgctgcagtagtccagttaaagtgtacttgtgcatttctgacacctcacccttcaggtccaacttagcctcctcaccaggccagcttgtctcctgtagttctcttggcaccctgtgtgttcctactcaggacttgtcacagtgtgtcatcacacacacgcaagcacatgctgtgggacattgatgtcttgcccactggaagggttccgtagggtggagtcagccccactttgctctgctggcacttagcacggcatgtggcacgtagcaagtagttaggaaatgtttgcagaggaacatgaataagtcttgcacgaggtgccggggagctcagaggaggaagcagcctcctttttttccaggagaccaggggacgctttacccagaagggccctgctgctgtggagggtgcagcctccttgggggctgagtgtggagggcaagcggagggtagggctcaggggccagggtgatgggtgcgggtgggaggtggatcagacagcattgtgagggtaaagggttgggattttaagcaaaaggcagcaaagagctgttgaaggctttttggcagaggcatgtcaagaccagatttggagtttcgagatactcatgtagctataccatgggggtgggtgaaagcgtgggtgggagaaggcacaggggctggagaggaatgggagggaaggcgttgtggtcactgcttcctggcaggggcggggagggagcctcaactgggtctgtggggcagaggagccagcaccactccagggctcgtcccgggtgggtgtggatggagatgccacagcctgggtggctcccagggtgagggtcaggctcacagggaggacaccaggcctcttatcgtggctccattctctgtggactgcccttggtgggactaagagcaggcaggtctccatgtgtcctggacacggctcctgacccagcacgtgtgtccacttttgggctgtggtgagggtgattgaggggcagtgtgccaatgtagaatgactatatggcatgtttgtgggctaaagtaagtgaatgcttaaattgacactaagatgcggtgagcttgatcgtgggtcggccggtttccattcagctaaaattcgtgaagtgggggcatcactgactttttttgtaaagagaaaataacctgtaaataggcttttaaaaatagacacttactcttgctttttttgtaaatcagattgacctgtcagtgcactctggggtccggccagctgcgatgatctttagaccagtcagccgccggctgagctgacaccttttagatggaaatggaataaatgctgcaccacattgttcgtgtgggtggtgaatgcaggtgtttgaaaccattagcttctttgcataattaaaaaccttaattttttgtgaaatctttaatcatagaagaaatgcttctttccagtttgagtgtttctcttaatattaccattgctttaagacaattaccttcagggctcattactttcctggacagtttacaggccagagtggtctccactcagccactagatcttagaggattctaagaaaccctattcgttaagccaggtaactcatatattctgaatctataaacatgtctgaaaattgtgaaacatactgtagagtttatagaagttcttaaaatacatacattgtgccgggtacggtggctcatgcctgtaatcccagcactttgggaagccaaggtgggcggatcatgaggttaggagtttgagaccagcctggccaacatggtggaaacatgtctctaataaaaatacaaaaattagccgggcgtagtggtgggtgcctgtaatcccagctactcaggaggcggaggcaggaggatcgctggaatccgggaggcagaggttgcagtgagcggagatcaagccattgcattccagcctgggcgatagagcgagactccatgttaaaaaaaaaaaaaaaaaaaaaaaaaaaaaaggcccggtgcggtggctcacacctataataccagcactttgggaggccgaggcgggtggatcacgaggtcaggagactgagaccatcctggctaacacggtgaaaccccgtctctactaaaaatacaaaaaattagccgggcgtgatggtatgcgcctgtagtcccagctactcaggagactgaggcaggagaatggcgtgaacctgggaggcagagcttgcagtgagccgagattgcgccactgcattccagcctgggcgacagagcgagactccgtcttaaaaaaaaaagaaaagaaaaaacatacattgtatttgattctagtcaaagaacataaagaatacttcgattttttgcctcaaatatccctaacactagaaatgttgtttgtctcaggaacgacagaataaagtgcttcataatgtgggtttgactggcatagctttcagcccgtgatgtactggattaatattttatctaattgcatgaccccagctctgtcgtgagcaggagttgcagtcaccaggctcccgcggtgaatgtcgtcctgctcaccttcttgttgcattctgtgatgcagccatcacgagctgccatgggaggtgctccaccctgaaagctctctccaggccagcctgagtgtggcatccacatgagcacaagtccagcaccagctgaggcccccagcccttcactcttcacccttcctgggtctccagtttctcatctccaaacttaaaacttgccttcatggccacaaaaggctcccaggagagaagcagggcgcttggcttgagtattctctacagtgcacctttgttgcttccctcttccctcttccacactcagcccccagggaggctgctccctccacagcatctgggtgccctactgggtaaagtgtcctctggttcctctctgcatcttgctgagatggccctgcccttctatccctacccctgtaggttattagaaatcttccagcgagaagggcgcagagcctggtgccagatggcactgtgcatgttagcaggttggatggctcatccttgggactgagttgctcaatttaaggaattttagacttggtatctgggttcaagcatgtccctgtcctggctatgtcccgagctgcggaccagggcagagcaccacatcttttatacagtgtccctgtcttgttcatctccgaggctcagagacctcatttgtgtggctgtcacctgtgcctgctcaagtcacgttgctaccttcctttagcacctggacacatcagccagacctccctccctgggaccccttgaccagaggcagcaccgggaacctgtgccccttgccgctggcacacatgggcaggtgcccgtgtcactgagcccagtcatgcgccaggcctgtgccctcccctctcagggtgcaccgcagcagtgggagtgcctgtcgctgccgcctgctagggttggtgctgggtgggggtgggtgcagaggctgggatctggaggccacacctgcagtgtcagagactcagggcgagcttcacacctgccctgctgcttgtcctgtggttgtttgcttattcaagaccaagtgtgggcgaccaagattgggcaatactcactgcatcgcgcttccttacaggctgagggcaggtgcctgccgctgtgggaggaaaacctggcctgcagaaaaataaaaactgccagagctgcacgagccacacttcattgcactgtgcaatgcccactaggatcaggccactcatgggggtgggcatgctggcccgcagagcagccagggccctgcagcccctaacaaaagaggccacgtgcttcctgttttagggtcgtctgcccagctgggagcaggccatctcgctgcagcactgtccagcagctctgtgcatgctcacctcccaagtttgccctcattgctacctcttgactgagctgtcttcgtgattcctgagtccaaggctggacatgagagctcagagggccagagtgacttgcccagggctacatctgcttcctcgggacttcacctctagccccattgtcccgtggccttaggcagctcacccatcctgccatggagcccccagatgactgaagtagtggccaggcctgcagggtcctcaggcacccaggagcttgccctcgccaggcgacctgctgctccatgggtggacaatggtgtgcatggcttgggtgctgggccgcaaccccccacaccctcctctaaggcagcctttctcctccttcctcagccttgggactgggccctgccccacgagcccctgaattagcccacacaggaaaacaatcaggcccacatcgctgaacagccccgctgtttaaaaggaagagaatgggacaggcttgttccacagcctgcggagaaggctcaccacgggaccttgtccctgcgctgaagggtgccttgttgtggctggagcagtcctggcctgagccccaactaataacagagcccttgaaacccctgcagtcaggacagacgtcccaggcgagcagaggccctgcgtgaggatggggcggcggggccagatggtgtcctgagtatccatcctccctggtggctgaggacacgctgaccagcgtggggtcaggagcatggcccctggaaaggtgaggccagctgggcagggtcaggggcttgggttttctttgtcatttggtaaatggtcttgtgttcccatttctcacccctcactggggttgagtgagaatgagctgagtaagtgggcttccttctaatgtgaggggaccaaatgaccagctgcccttctggacaaccagaggaaaaacacacttgagtggaccttacaggcttcactccagagctttgcacttctgtgctttgaagacaacagaagtgcaggatgttgtctgagatgtccgtcattctgtagctggccagagagcagccaaggctgaggctgtgatttgggggtggggggcagcgggggcgcttccttggcctgggctatccctgctttctcttactgggcagccaattcagcatgcattgggatgcggcacagcagatatggacactgggcagtgttcatgcccttcctttatttaagtttcatttatctcgaagtttctctgttttgcacagcctttgtaaggaaaggccggacatgcaacctgtgggcgtggccctgggaggggtgcacccagaccaggttgtccaggagcaggcagcaggctggtcggggccgggtggggcgtaggtggagcctgtaggacttgctctgcataaagccgtgggtgtggctgatgttcaggatctttgctgacacagagacctgggtggccttgtttgtccctgggttctgtaaatcaaagtacatgcccggcactgtgtctagtatggtccaggtgtgtgaaagtcagagagccctgggagtctgccatctctgtgagttggggaaaggaggaggggccagaaacaaaccagaaactccacagctcttgcttaggagcctaaaggaaagaaacagggcaaagcagccagaaggctgggaactggagggccagtcctcggactagaatttacataggaatgggggctgtgaatggggatgcttgtaatccttccagaattggggtaaaatttgcatctgaatggctcatcaagtcaagattcccatggaatgtactggttttctggttattttccaggtcctgttaatgatcatttgcatgtttactcaaccagcattcttaaaattaatattaccttatgactgcctttatcatgactctcttagtggggatttctgtcctccacatgccctgggggatgtgcagcccccgtgcactccccgccttggccggccccttcccccatgcccaggtagactctgagctcttagaccagcaactcagccctcagatgtgtttggttgggacttcccagtattaaaaatatatggattaattatgttgcagcattcaaaggcttcacctaaaaattcaggtttttttctttcaggagaaaaaaatcaagaactattgcccacactaggccatgttgtagaaggctgggaggtgcagtggcccctttagacagggcctggcccagctgccctgcctcccctctacattccctgacagggccctggagacttcactcaaaggtccatggctgcacatgccaggggtctgcaggaggatgaatgatgccctagtaccttggggcatccctcatccctggaacctgtgaatgtttccttacatggtaaagagattttgcagataggattcacttaagaaccttgagataggaaaattctcctggattttccagggtgatccctaaatgtaatcacagagttttcttatgagagaggcaggagggcagagaggagagaaggtgctacgctggtggtggagggaagaaaaactttcactctactctcttagatgctgtttctagggcctgcgaattaaactgacgaaagacagtaacaggagaaaagacagactaacatttttacatacatgaagcttcatgaaagaaagtgaaaacccaaagaagcaatagatttgagggcctgcataccgttttgacaaaggtctcagtggagattgagaaggcgcccaacgccattgttctgtcttcccttctagaggtttctagggtcctggctggctcctagaccgagacccctccctcctctacctacacgcgtgctggatgggggcagcatgcatcgtggagacaggtggatgggcctcacctggctggcagcgggtgactgggtagaccttgtcgcacattactgctgctccggggctgaggtctggctggtcttaaaacatgaacagctggagacaatgtggtatgcgtggtccacgtcacttggcattcctggtgtgctccatgtgtcacagcatctctccccagagcggggcagtccgtgcatgccaagtgctatgtgtgagtcatgcacagattcctgcccacgtctgcatgggggcttctgcagctcatcatagcatccatgtcacccagtccagaggggagtggtggcgctctggctggagctgcccagtgtgacccacacttagtgcggagctgctggggtatgctggtaccagcatccagaggctttgagagatactgtctgagccccgggacaatctgcacctagggccatgctcttgtgtgtaatgggacagcagagggctttgtgtctccgtgttgcccccggaccctgtgaccctctggacttctgccctgggtggtatccaccctgtacttgggcagaacctgattgcttctatcagaagcccatgctcggctacatgcaggggtgggaggtccctcccagagggggttaagcgaaatgccaagagttggatgcatctgacctactgtgcctgtgcacagtccctctctaggacacataccgtgggctcagaaggccgtagcatgtggcaccagctgtctttacagtctgcagtggctgctggttggacagaggtcatgggagcccctctctgctgattggagagccctccctgccgattggagacccctccccactatcaaggactccgtcagtgctgaccatgctgcagtggcccactgaccgcctggcccccctggaagtgagcaagtcccctggtggccccacctcagtccgtctgctgccggctgctgtctctgcagttgcactcatgggggactcgtggcagcctcagggggtcactgctacatccatgcctctatagcaggggcatgcatacatccgtgctccagcctgctatagacagtgaggtgagaagtccctgtgaagagctggcttttgccctgtgcccaggatgcaccagcagcacttggcaagtcctagagccagttctgccacgttcccaaccattgtgcacacccgaagacgctcttgtgttctcactatggtaacagaggtccccttcaggttgtccttataaaggtggggtcactttgaggacatgactggctgcagaagagatttctggcccttgtgaatagtgctgtcgtgaatatgagtgtacacgtctctttgagacttctttgtgtacatacccagagtggaatctcaggaacacatggttattctaaagttttaagggaccgtcatgattcccacagtggctacactgtattgcattcccacagcaaagtgcaagagttccagcttctccacatcctcaccaacacttgtattccatttttgtttgtttgttttttgctttttttttggtagtggccaccctgattggtgtgaggcggttgggaggttgtttttgctttttaacctcattttcatatgggtattaagtatcatttgcctgcagcaccaaatctatttttatcattgagggcctgcaaatccccacggggtgtgccccactgcactggtgaccagagatagaggcagggcactcagaggaggaagagccatgcagccagtggttttattgctgcccttacgacagagtgctggagggcgcccctcacactagcctcaggcagttttaggaccttactgtggccgccctgatcatcctgaattttcagatctcagctcccaactccccagggtcctgtccccagatctccaggcttagtcagggttacagttccactatctagtaaaaatgacccaatccattctgtggtagtacacttatataatactacttatattagtggttaacatttattgtgccaagcagtgttataaataatccaagtaccttttgtggccaactctgtcttatggatggaagccaaggggcagagggttgagtggccattccagggctgcatagctggtaagggtgggcccagagggtgcagctgggccaccaggctcctgtgccatgtaaatatgcctctcctgggggaacagatggactggtcagggcttgtcatggcagagcagcacagaagggaaggtacactgaggtatggacacagagagatgaggatagcatagatgaaccagagctcgtattggggccttgactgtatggatcccagtctggccaagggaggggctgggaacgtgtccttgaggaggcgggaatgtgctctgggggctttagggccaccttcttttttgctgaggtgaaaccatcaagagagagaatcttgctgggtacagtggctcacacctgtaatcacagggctttgggaggccaaggtgggaggatcacttgagcctaggaattcaaggccagcctgggcaacatagcaagaccccatctctacaaaaaaataaaaagatagctgagcatgatggctcacgcctgtagtcctagctactcaggaggctgaggtgggaggatcacttgagcccaggagctcaaggctgcagtgagctatgattgcaccgttgcattgcagccttagtgacagggtgagaccctgtctccaaaaaacaaaagagaatctagggaaactgctcttgtttgggagaacaatactgaaaaatgcctccagtaaaaaaatttggaagatacaggaaaattcaaagaagacattgaaagtgcccctaaaattccacctcccagaattagttctggcattttggtgtccctcctcctggaggttgctctacctgcatttgcaggtggtgttctagccagccctgggtgtgccccgggtggctcacccgcaggagcaggagcaggagccgccagggttaggagtcagcctgggagtgagcttggaacgtgccagtcaggccattccctgggtgtgaccttttatgactgggttttttacatgagtaagcttgcacttaagtgctgttttatcttctcctctttgcatttaatagaatgtttatctgtatttgtcaataaacatcgacttgtgtggattgtactgccggcatagcatgctataatattattgttaatttaacctgtttctgatgggtgcctatttgttttttggtatttttccctcaagatggagtctcgctctgtcgcccaggctggaatgcagtggcatgatcttggctcactgcagcctccgcctcccgggttcaagcgattctcctgcctcagcctcttgagtagctgggattacaggcgcgagccaccacacccagctaatttttgtatttttagtagagatggggttttgccatgtaggccatcctgatcttgaactcctgacctcaggtgatctgcccgcctcggcctcccaaagtgctgggattacaggcttgggccaccacgctcggcccatctgatggtgcatatttggatgacagatttttactgataaggcaccatggagataaacatccctgggcagggcatctctctgagcttgcggggttgctgaggccttggaaatacacctgttagactctgtagacatcagaggccagtttccccctccccagtaactgtggctggtcctcttccctgcctgggaagatgttggctgtttgtcctccgagcctggctgctgcccctctgcaggctcctgccctgggtgggttttgcgtctggacaatagccacccctagagaggcagtcacagtcagttgtctccctctgaagcttggagggcatctaactcacccagtaagtggggtccaggccccttgacacagtgtgtatgtggttggggagctgtctggagggtttgctctttggctgctggggagcagggacagatgcttggagtttctggccccaagtgggagagtattgctgaaaacttcctcctagttctgaaattttgtggtgtatgttctgaccgtccagtaattcccttccctgtgtgaaatatttccagaactttctgtcatttgcagatgctttgggcatgacttgccatcccagcctgaggcccgtcctcctcagccaggcttgtgaccgctcccacccacagagctgcccgtcagggttaagcagcagctttggaggctttgatacaggttttagggttacagagtttttaatgaggttttcttgttatgtgcattttcagagtgctactatttggcaaagcttgaccccaaacagaaacccacagctgcattcttctgagcacgtaactggccactccatccaccatgtagacttcagtttgcaaaccgcgtaatttctttcttgtgctgctttttaaagctagcaaaaaattattgcaccatgcgctctggaatgggctgttagcagcgtgcacttctctggaacagcatgcttcccgggcttctggaggtcgggtacgtccctcggccactgtcacccggctgggacccaggaacctgctcttcatgaagtgctcaccaggctccaagcttgagatgaacttgagattctgttaagaaaccgatttgaatgagcacagctcagcccaggtgtgctcaggaacttgctttggcccacctgagtttgtctctgatgcagggcggggaactttgctttccatgcctgtagtgtcagacactgccccctaccccccaacactgatatgacttccggaagtttccaagccttgctttcttagctgcaaaagagggatggtgacagtgttgctgggtgacctgaattactgtcttcacagccccctctcctggccccaagaaggcgctcaccctgatggggatgtcgatgctctcctagatgtcgtctgctttgggtgaagctaggattagaggcttcttggcatccagagtcagccgaggtggccgccggcctggtacaactcctggtggtgggtctgggagggctgactgggcagggaggttaggagagccaggctacatgccacttctgtccagtgcccatgcccaggctgccccgtgggtaacctgcatttggggaaggagctgggggctgtgcttgactcttcgcactcttagacgaaccgcttagtgggcctgtgacccaaggccaggagtgagcgtggaaggggagaccccccccacagggacctaggtccatcctgtctgtcttctggacctctggagcagtcatgcggagcctgcagtggtgtggttggcagggtccaggggccctgagggacccagggggcagagccctagagaagctttgcgctggctgctgacaaggtggagatggggacctagtggctgctttcttgcgtatttccctatggccagcccatactgggatctggttttttgctcttctgggggatgtctgtcaccctgcccctggaggtgggttggccgtgtgcaccatggtcctgtaggtggggccgggggccattgccctggtgcaggagaaagcagtcttggagacagtgggccaggccgtgtgcagagtggctgggagctggcctgcgctgcatgaccttgagcaggctccatgcctgtgcctcattctcctcctgcctgtgatgaaggggccggttcctcgtggttctgagttcctgtgactggctatttgtagccctgagatccacgctggctgcaatggaggatgtgtgcctcccctctgctgccgcctggcaccctctctggtggctggggcatggcactgggctcttggcaggtcatatgggtcttgccctcgtccttccagttcaggttcccctgcagggccagggactgtgtttgggcagtgctgggcagcatcgaatgtgaggcccagaaggaagctgcatgggccatggtgggggccgcctggagctggtggccagtggtggtcctcaacttgtgaccactgagatggttgggaagagcctgcccagggaattgttcagtgtgggggccgtatccctccatgacaggtcagcggtggtcagacggacagcagcaggccctcagtgacacacgcaggtgagaagggcctgggtgttggagccagcgtctcaggtcagccctaagccacccacgcctacagggcagagtccacccctcagggccaggcgggccctccacaggtggtcaccctagtggtgagtgcatccctaggggaaacacacctccttcctgggccctacgagagacagaacaatggccaggtagcccccctcctggagctctcagacctggaaggtgactgtgtggggggcaatgagtgacagtgactcaccagctcctccccacgtgtgacccgccacgtcgcacacattctgaatcatctggaaggtgacacactgctcggaaaatgagaacccccacatgctgtagagctggctgcttgctggaaggacagacaccgggatgggactttgcagggccgtagccccgtaggcttgggcactttgaagtcagccccactaaatgccacttgcaggtgctgctgaccggggggtggagagggggttccaggttaataggaccaggttccttttagcagtgcagggaaacgtgagtgagatctgttcccatttgggtgctgcagagtgaatcctgaaatattgggggtttgcttgactccttcagtggggaattcctacctgggctcctttcacactgagaggacggcaggggttactccccaggccccggctgtctcagggaggcaggggctgtggttttctgatacaggcatctcaccagggtcacaccgcctccttagtccatatgcacttgaccctcttctggcatctacggctatttggggttggatggacctgagtgactgactgtatcattttaggctgcccccctcttctgactccccaggaagggaattgagggactgccttacttgggctggaagcatctggaagagaggagaagaaatatcatttcccttgcactgcaagggaggatggatttagtgagttgaacgtggggattgactataattcattagagtagagtgtatctacctctgacccaatactgggcttgtgacattcagctagagggtcatttggtgatttggaaatagaaattgattgaaattctggccatccatatgggcagtaattgtcttagtggcaaagggggaactcgctggggacagacctagggcacaggtgtggcctgcagtgtttgctccttaccatcgtagccgggtgttgtggttgtcacattgtctatttttagcacttctgtgatgcttgtcacctgcccacagtgaccacttggtctactgttgatgggaagtgagttggtttggtttgaatatggttaagatgtaggagagtcttaaaataattatgagcttagttgaagttgcttcctctgatactgaggttgagggaggttcttgtggcctctgaggggctttgggggctggtagatcaggtcgaggctgcgtgcacctggtgtctgcgcacgatggtaagacagcatttaaggtcagtactgagacgggaactgacagccccagatgatgaaatggcgaacatccttttgtttcccgcctggagtgaggcaaagctggggccttcgcagagctctggctggagcttgtggttctctggtgggtttgccacgctgttgctaaggctggcaaaagccatgtcctggggaggaggcccggatagtgagggagagcctcctgttgactaggttccctgttgactctattctggttacgagctgtggtcatggtggtctaactttgtaattgtagtgtatatatttaaagaatcactaaagatgaaagcaaggaaagtggcattttgtggttttgagacttaaaaaagaaattcccacttggactggggcctgtcctgaggctcctgggcctatcccctcatgccgtgcctgcaccgtggcagaacgagcaggcctctggcgcctttgcagctgggctgagtctgagggcagcaggggaggaggatcccggcctggaggaggtccagtcccctggagaaactgcatgcgctccccctgcggacacttggtggggactagggatgcctctgagtgcagggcatctccccaggctgcctgtagtcctgaaccagttcagggttctggatggttctggcagattctgtgatgccttcactgctggcagttggcaaagagaaggagccattgtttctgaagggcctgtctctgccctggtgtccctggaggaggaagctgttggctcagggcaggtggagcctcagcacagctggagagcactgtgccagtcatggtcctggggtcactgcaggacccgggagggcatctcacctctcccagtggctctagacggttgttgcatttttctgagcctgtttttcctcttcccagcagtgctgtaaaacctgtctccagtggggcacactgggggagggggtggatgtacagccagtggggccacagggtcaggctttcaggactcctgcccctgatgtcaaagcagcgggcttgtaggctgtccttgcccaggcctcttgaacactgggattcagtcagatgtcagatacgagggttagtgaggagcctgccagggagctatgaacatgggaggtgtgagcagccccttcccagatgtcagggccacgtgctgcttccaggtgactcacagcctgacccttgcagaacccagtagaacagtcacttcctcacccttgccttatggcgggtgttagttattcttcctgcttacattttcccccaggagaccccatgagtgaagaccagctgaggggaggcatctgttcccagagggcaggtctgaggttgccctggccttcgagctgagccacagtggacagccaggatttcagtgggtgggtgtcaaggatggactcaggacatacctaggggaggtggcaaggcctgggtaacactgggcaaggcaggaaatctggtggatgcaggccagttctcggtcctggctgccagttacatgggctgctctaaaaccagacagaccctggcctcactagggagctgctaaatcagaatatctggggggctgggtctagataggtggtgtattcttggtgttccacagaaagaggggaaaatgcacacctagcaagttgtagggcttcctttggggacactagattgggggctgagacctgcctctgcaagccctggagagaaacaggaggctttggagcaagagaatagtgtgatgcgagctgccttgtaagaaataagcatgccttgtaagtcccctctgtgtgtagggggactgaaggccgggggcacaggggccgtaagaaggtggagctcttagaatgtggtgtcattcccttacaggtagcgggagccaggtggaggcctcacaggagggatggtggtatgaaccgtgggtgtgagggaagtgggggacattgggcagaggtgggggagggcaggaagagggtgcccaggagaccaaagccaggcaggacacagtgaggaaggcaattagtagggttcgagaagggtcctggtcagagaaaggagacactcaggaattaagggtgcaaggttctgaaaaaaaagagctcgaaggaatttggagtcgggacggaagcatcttggatttaaatcatttcagactcattgagctgaggtaagtagtaaaagctaatgttgtggtcgtgggctttagaaagaaacttcaatttaggaataaatcacagagtaaaccatcatggtttaatggagattgacgttgatctaggaaaacctatttgcccctgcactgctcgtttctgtgggattctgattggacctttccgcaccttggtgtgggccgccattgtggggatagtgccattttgttggttgtttgtaacattgtgtttaacgtccatgccttacagtcctcatttgtgcagtctcatctctggtggtagggctgtgtcttaccctctcccagggaagtagctgtggggaggaggaggtgctgagggagtagtggagggaggggagttgctgagggagtagctggggaaggtgaagtactgagggagtagctgagaaaggggaggtgctgagggagtagctgagggaggagaggtactgagggagtagggagggaggggaggtgctgaggaagtagctgagggggtggaggtgctgagggagtggaggtgctgagggagtagctgagggaagggaggtactgagggagtagtggagggagaggaggtgctgagggaatagctgagggaggggaggtgctgagggagtggaggtgctgagggagtagctgagggaggggaggtgctgagggattagtggagggaggggaggcactgagggagtagctgagggaggggaggtgctgaggtaatagccgggggaggtgaagtactgagggagtagcagagggaggggaggtgctaaggaagtatctgagggataggaaggggcagaggcctgttctgggtcacacagctgggatgtggcagcatgggaatctgaaccaggcaagctggcctcacagccggcactgcagctatcacaatatgcttcctccatagttgggggagaaactaagaagcaattaaggtttctaatagacttgaaagaagcataaaaaatgtttgagctggccggacacagtggctcatgcctataatcccagcactttgagaggccgaggtggacggatcaccgaggttgggagtttgagaccagcctgaccaacatggagaaaccctgtgtgtacgaaaaatacaaaattagccaggcatggtggcacatgcctgtaatcccaactacttgggaggctgaggcaggagaatcacttgaacccggaaggtggagattgcagtgagccgagatcacgccattgcactccagcctgggcaacaagagtgaaactccatctcaatttaaaaaaaaaaaaaaaagtttgagctaggtgacttgtattttatagcaaatatagtattactttgcaaaaatgacttcagctcaactaactgaaagttttagaagagagtcaaatgaaaataaatcatggaagttatgtgtgattatttcccagttaaaggaagcaaacctgtcagcctgatcagtagaagccctgagcctctgtttaagaaaggcaagagaagaacacattgctgacacattgctgacagtctctaaaatggttatacaggttgtaacgactactaaagatcccagcacttgtgtcttctgtactaactttattaagagatttcatcaaaatggagattttcaagaacagcagacagacatgatggaaccatggaatctcccccgtgcccatctcccagtgccctctgtgtggtgcctagacctctgtaacatcactgtgaacattccagacagaaaagattcttggccgggtactgctggtggttaaagaaaaatgaattgtaagtggagagttggaaaggatcggaatgtcccacattatgatatttaattatggaatattgcacagccgtgacaggctgctgagggcaccacgtaataaacggcacggggatgcgcacgcatggtgctcggggcagggacacacaggacctggacgtgacccacgcgggccctcttcctctaccagcctgtaggctccagcctctctcttggacttcaggtctcctcttgcatggctcccagcctgcctgtcccacttcccatgttacagagccagcagggccccccaaccgtcctgtgcggttgctgtggcctgccctccccaagccagaaagcaggggctgggggtctacagtctatatctgactcacaccttcaccccacaccctccagtagtgactgttgagtgaatgagtcagagtttcttagaatgaggaattcaccaaaatgccagaaagaccagaactgtatgtcatgtctgtctgctgttcttaaaaatttccattttgatgaaatcttcctcttagtaaagttagtacaggagacacccgagctgggatcttactttaaccagcgttataacctgtgtaacctttttagagatcgtcagcaatgtgttctcttgcctttcttgaatttttcaaattttctacaattactgtattttacttttgatatcagatttaaaatattttagttagaaaaccacatgattaaggaaggaattcgaatagttctaaagaatcaaaatcatgaaaaatgaagcacactccttttgcagatcaaattctctctataggcattgctgccagcaggttcttgattaaattgtgatctcttgaatcatccttctgatgagcctgtgtgcacacccacacacacacacacacgcacacacacggtcacacaccatgtgcctgcacagacggaaacatactactcacatttttgggaaccttactttttactgaacagcgccctttcatacaattgcagctttattctttttaacagttgcatagtattccatcctctggaatgtgcaataatttgtatagaaaacgttctatgctgtatctgtgtgtacccatgcacatagacgcacacacactggtggacttctgggtgtctttggagtttacctattgaatagcctcgttccagtcatattgcacacagggggtatatccatactgaattcttggtagaggactgttggatcagagattctggatgtagcttcttggcaggtgttgcccagcagggtgcggaaacatgtcctccgggccctgtctgtgtactttgtagccagcctttctcatgggtgccctgctcagcagagtgtaatggtattgtgttgtaatatgcatgcctaccccatcgaggtgtgtgctgcagtgccaatttcagcagaaggtcccccattgctctctgcctccggaacttccttacctgcttctgggccaggatgaggagattgagcagaaggggctcacggccctctccccgtccacagccacagcagtgctgcctgtcacagtgttcctaagccctgcttccaggagtctatgtggacctggggaagccccgatcccccgtgtgtgcaggaggaggctggtggagcccacagtccctggcagtaggggttgttagatgtgctaatagctgcaccctgcttgttatatctctctgagtcttcttagctaggcagatataactggcttcatttcacaggtggtaagaatgatagttaatgcctcccagtgcttaaacagcatcgggcacctaggaaagcactaggaagcattaactgattagtcatggatcctcataaccaaatgagacaggcagtattagtatgcccactttttggataaggaaacagaggcccagagaggctcagtaacttccctcaggaacacacaacttggagaagccaggactggaacccaggttcctctgattgcagagccccttgctcttgcttcatcccacttgtcttctctgtgtgctgaagaacaccaggtccctgcttagggagtacgcccagaaggcgaggtcatgtctgcaggatggaggccagatgaaggcgctgccagtggctctgtccttctgccatcagcgaccactaaatacctgttcgcaaggcctgggcgttggagccccacactctcctgcactagagggggtgcaccaggagaggatgtgaaggccatgagagggaaatgcttctctctcctaattaatttcattgctttttgatgaacaggccattggattctttttacctgtgctgtcaggagttgggagatatgagttaaaacagcacgatgagtaattacatgagaagtgtgggtttgcatttttaagccaggtaactcataactgtggggttgcacgctgagaaagaagaaacaaaccgtgtatgtgtagggtgaaggcaacgcggggttggggcctgggcaattcactaagaaaggaagtgtgttcccactcaggaaccttggggctggcagctgtttttggaggctagatatgaacccccagctgggaggcaggacacaaggatgctggtgttcaggtggagttgttggaggcaattgagatgagaacccagacctgctgacatttgttgttggatgccacaaaattaccgtgaatatgataagtgtcttaaaccacaggatgagcagttctgggtctttattaaagtgacaaaggcttatttcatttctaaaaaatagaagtttttcaggtgtttttttgttttttttgagacggagtctttttctgtcacccaggtcagagtgcaatggcgcgatcttggctcactccaacctccacctcctgagttcaagcgattctcctgcctcagcctcccaagtagctgggatgacaggtgcgcaccaccacacccagctaatttttgtatttttttttgatagagacggggttttgccttgttggtcaagctggtcttgaactcctgacctcaagtgatccacccgcctcggcctcctaaagtgttgggattacaggcgtgagccacagtgcctggccagttttttagttttaaaatccgtgatattcacattatttacctaagcctcttatttatgtatgaatctctgcctttgttgccttcaactgttttttggcacagtctctgggcggccactgtcccctctccctcccgtgtgacaggaaggcctcgtggaaacaagtgatgtggcactttgcaggtgcccacagtagcgtggactttccctctttgcttgtccagcagttgtgcccaaatgctcagccctgccccaggagtttcaacaggaaatgtcggtgtcaggtcctgggtggatgtggccttttccaggattctcatagctgctcatgtgaacctacttttgcttataaaattggccgtaagagccatccactgctggagggaagaccccagtatcagtctctggaagctccactacggtggggcctgatgaatcgtgatcgtttctgatcactgccctcgcggttcatttgctaacctcaggtgcctgctcagggttcagaggatgtgtcggccccgaggggtggggggaccggatgttgtgtgcctggatggccgtgtctaaggttctgcttcctggggaggggtgtacagggcgtctgtagaggagggagccgtccagtgaggggcctgggtgggagggacgggggctcctgtagaggagggagagccgcctccttcccagctggcttcaaaaaaagagccgtgatcatataagctctgaaagcaaaaggcaaacaaaaaagaaaccctcctcaccacagaatatgctggagtctgattccaaggtttaacaattacgtggctcctgtgttaatagaatcatggagggatcagcgtcggctcctgagcgtctgcagtcctgcacgtggctctggttttgcgattctgattctcttgatctaattgttggtgctgctactgcaccccacgatccctgtcttgagactgatctcccacactgcaaaggagtgacagccatgctatggaaccttgccacaccacggtggacatcgttctgtttggctgaaaaccagccatccaaaaataaaggaagatgaacagctctttagtgcttgtaattatgccatatgtgtttctgctttttccttctttgcctcatgaagatgaattttaaaggatacatatctggagctaatagacaattagatagtacttttttggttcacagactctgctaactggaatggcttattgtgcaagaaagtacacctggtcgggtcctggggctcatctctagcaccaggtaacgggctgggctgcccttcccctctgttcgtgggtgggtggttgcacagctcctccctcctgtctgccccagtgctgtcttccccagcacatgcaagccaagctgatcctgcgtctaaggaagtctagaaggtttaaactcacaataatttgttttcagtgcctttctaggagtgttgctgagtttaagtggatgcacagtttaagggcttaaatagccttgtttcccattattttcacagcaaagatttctgaagacgtctttctagaaatgactggaaagtttcaagaggcataagatacaggtaaaaccactttattcatgatctgtaatttcagttgagcagagttgataatgtgtagaggcctcagttggatctggcaggtggttggttgcttggtcccttggtccctgatatcctgtggggcaaagcttcagacttggctgccatcccttgggcccggcatggggaggtgggtgctgggcacccacagtgattgtctgtctctgttcttgctctgccactgcttgtcccagctccccctattcttccctgctctctcggcctctcctcccactgggtcttgggattgtggcagctccgcggctgatggcccctggtgcctgcaccagaaagcttactctcttcttttggagggtgcaggaaggtggctggtaaggtgtggtgtaataagagggctctccaggtcaccctcctcagatttgggccattttgtgtttaatcttaattttggtccgttccaagccatgcattttcagtttcagaggagaaggaaataaccagcttaatttgtgaaaacaaaagtcaaaccccatctttccttcatcattttcatattactcaagtatcatgaatgagcccccacaaggttttttattctgctggcttttaaagagtcctgctgccagcttagaccttcatggttcctatgcatgggaccgtgatgagagcacatcttgccaattagatagggcggctttaattagcacagcatcactgccagggagacagcactttctgtgcttattggctagatatattatctggtccattggggtgggagctctgttttcttacatttgttaaatcactttatttattaggaattggcacttgtcttacaagtattttttgctagtttctttttcctcccttaagtcatttgtctttgagttttgttttttgtcagtctcttcataaaaaatattttggaatctttagttataaggtaattgaaagcagggacaattttatccattctgtgctgtattaagcagtaagagaattccattgtgagagcccaggaggactggctccttctgttattttttactttgctgtcacaaaaagcacgaagtatatatggggaaaggaagccacttctcatttttttatgtaaataaaaaaaaggtcaaaggtatggcaagaaatagtcacctaaaccaagaaatggattagcatgtgaaaaatcgcattatgcacagctccatacactaatgtggtgggtttcaatttttggtctactgacttgggtgtagcatgggtgaaacataatctcttcatgaattaaatttttttacagaagcaatataaaagtatgattcattttttaaaaaacaaagaaaacttgagttcctggttgttctcctcctcctcctccttataagcgaccactgttaacagttggctgtctgtccacgttcatgtgtgtgcatttgtgtctggtatctgtgtgtccctgtgtgtaggagtgtatgttcttgtgagtctgtgcctggtgtttgtgcatgtccctgtgtgtccgtggctgtgtgtgtatgtgttgtgtgtagactgacgcatcctctgttgacacaggtgggtcgcgcctcgcgtgttgttgctctacacatgtcttcggtgtgatgggctcacaggcagttcgtgtagaccagctttagtctttgtaatggtgttgtcttccttgcctgactgttaaccagcccctcattgaggagcatcccctttggttgcacattttactgtcacgtcatggcagggtggtcttcccacgtgtcgctttgcacgcctgtagctgtgcacacatagtttgctgcccaagagttgccaggggatcagagtgtgcagacatctggatagttcagaattgtacccagaagtcctttaccccacaccttcccagcactaactagcagcagacttttaaatttcagcttgctttgtggacaataatgggtattttattttaatttacatttggtttgtggagttaagcacccttggaattatttttgaaggtaggacagttttataagaggtggaaaattaagaatacaaataaagtccacttaaagcaaaacttttctatataatgtcttttatgtaattttgccctccctgcaagccaagctctgggggaccgaagcaccagttttagtgtcatatcaaaggcgctaccagtgtaaatggtgaccgacctttggcattctggaagcatctctgctggctgggttctgtccggtgctgagctctgctgggtgccagcagcccctgaattgccactgtctcagtcagctcaggctgctcaaacaaaatgtcatagactgggtgacataaaaacagacatttatttatccattccggaggctgggaagtcgaagatcaaggcgctggcagatttggtgtctggtgaaggccctcctcctggttcatagacagcgtcttctcacatggttgaggggtgagggagctctctgggactccttttataggggcactacttccatgaagactctgccctcctgacccagtcacctcccaaaggctccctctccagaaaccatcacattggtggttaggatttcaacatctgaatttgggggtaatccagacattcagaccatagtatcacctttgaaagacatgacaccaggcatccctttagggccgcagggttaacacagtcctccctgaggggctggccagccacttcccagaacaaccccacactgtgcctgggagccagtgtccagtagggagaccgttggcccccttagaggtggcagcaggtcaacattaggccagtggaagatgattatttttgctagcactaacctgcttgggcccaaggatgcatgcacacaccacacaccctccagaaaagacagtattgtctgtatccaagtctgaagagtagagtgatgtcacacaaatggcatgacagtctgcatctctaccatgctggctgctgcttagaggggtccccactcttcctctgaagggccctgttcgtgccgccactctgcgtgcatcctcatagcgcttgtcctgccgacattgctgatagatggatgcctgtgttcttcactcccaccgccctctgtctctctccctgggtttcccattctgtacatgctgcacccaggggtttgggaagtgggtgagggttagagcatgtctgagatatcctggctgtggctcgcttgcccctgcagggatgtggcttgagggtgaagtagactggtcctggcagctgccctgctgggtgagtccggcccaacacaggtccagggctaggcatgtccctgcagagctggagtgttggtctccagggatccattttaattctaggaaaactgaagttggaacaataaactgtttattatgcttgtgacctagacagctcctgaaacccattcctgattcctgatgggataaggccattttatcctcagtttgcaaggcagtgacatcagcatcctaactggaggtgggagaggggtttctgggggcagaggacatcccagggtggggatactaggtggccaggtactggcagggcatggttggtgagggctgcggtgtcttctgtttcccagcacctggctgcctgcttccagctgggagggaagatgtggtgagtgcgtgtcctccactgtcctggttgtagggcctggagagactctaagctttacctgccccatctgggcaaacccctgagataagaaataagccagaacacgctcccccaggcagtagtttgcatgcagtgaggtcaggggtccaggtaatgactgcctatgttagattggccagtccacagctgtcaccagagatcccctttcagtttccctgggatgccagccagggcattttaatgccagtgttgcatcctgttgctggcagaagcactgacaccttccatgtggtagtgactggtgtcccctctgtaatctaccctagctgccagacagctgatcccaggaaggagccgagacacgggtgactggacagtccccagatggcattttggttcatggttcctgccttacaggacacttgccagcagtcactattcacatctaagatgcaacactagatcagaatgtatgttctgcaacagagtgacacatgcacagatgcacatatacacacatgcacacacagatgcgcacatacatgtctgcgtacacatacacagatgcgcacacagatgcatgcacgtatgtgcacatatagctgtgcacacatacatgtatatgcatacacagatacatatgtatggatatatgtacacaggcagacatgcacaggtgcacacatacattatacacacacatacacagatgcccatgcatacacatatgtatacacatgcagagatccaagcagatgcacatgcactcacacaggtgtacatatgtatgcacacagacatacacatgcatgtgcagacatgcagacatacacatgtacacaacacacctgtacagatgtgtacaaatgtacaaacatggataggtgcacatatctatgcgggttcatgtgcacacatacagaaatacagatgcacatgcgtgcacatacacagatgcatacacacagatgtacatgtgtccacatatatatatacatacacgcagacatgtatgcacagtggttgctgggtactcccattttctctgctgtgatctcctgccttgatttgaagacccctgggggtgggagagctgccttctgacaagtactgacaggcaaaagagtgtggggctcagagcccccttggagttccattctgctgacatttaaagtgggctcgtgcaccctcatgaacagccccaattacgtgtaagtaatgagagtgacatttcacaaccctgtctttctaatgggctcctgtgtcaagtcattctttctgaatgcaaagggcagcaatttcacactgtcagggcaaaatgcacatgcatacagctcagctcccagcgggatacctttgcttctcagaaatggcgaagaaagccagcaaaatggcctttttctccttttgttttaatttaactatttagagtgaggtccttaatgtaacacccatcaatgattatggagccactgttctgaaagaactcgcagggccggcagatctgtgtgagttgtggtgtgtgctttgcttaaagcaactttaaaattatatgaaacaatgcattcttgttgaaaaaggaaaaaaaaaccctccagtgtcacaaagaaaatgtgcagccccctccccctccctgggaggagcagtatgtggcatggggtctgtcctgacctttggctactcatgtggactgttttaaaggccatttgagaagagcagcagggcctgatttatgccatcgagaatctggtgtctgctgatgagatcaatacactgcagacctggatataaatccgtgccaggaagcctggtggtcaatcattgttctcagggcagggcctggaagccaggtgggggtgcccgtgccctgctgagctctacatggcagtatctggattggtccaaggtaaaagcaattaagaaaaaggtttcttttcaacataaccagtttgagtaaccgcataaacagcaccagtcctgacagtccttcgtaaccatttaaagccacacaggagaacctgctggcttccacctgggcacctgctgacactcctggaaataccttctctcagccacattcgtttggggatggctttgccatccctgggtttggtcgtggatactattacaagatttgttttcaatctctcttcactggcgattttgttttgtggaactttctactcttggctccttacctttgtcctctccgggtctggccctagtcttctcactgggatgtttgtgtttctcctgttctacctcaactaagtcagggaggcgtttttaggtccttaggccaagtgctatgaaaacaataccacagagggggatggagtgtgggggtcaggggaggcaaagggtgactgtgggatggagccagccaccagcagctcctgggggtagaacagtctggaagagggagcagcaagtgccaaggctgcaaggcagcctgagacgggtggggtgcatcggagggagggggcaggagtggagtggaagaggctggccacattaggtgctggcattctgcattaaatcctgtgccactgcccagcacttcggctttgcggtgaacaatcctatttttacagcgtgtttgagcccccagatctggctgccctagggacccaggctctgcacagagtcagctcactcttcccgtccttgggagcctcccttcagggggtcgtgtcttctgcttctggatccactgggctgctttccccaggctgtgaggaaccagaacatggatgtctttttaaggttaattcattttatgagagtaattaatgcaggtaattttaaagtgaagtagttcttctttaacttgagagaggaagcagcacttgcttgtcttgtccctttgtcccttccctgctgccctgagacactgagtttcaactattttcactattttggtattttccttcaaattagatatgcctacatttcctgactttcccatcttagatgttgtgttatgatggaagacaggattgtgttctctgactcttgtcccctccctttccctctctttcttcccccagacctccagtggagttagttgtaatttttgtaatgggggctatgcaactgggcagtgataagtacactctggttacatttccattcatgggtcactcttgcttccctggggttaataacttcattttctaatctgtgtatctgttctaattcatcttcagactctttgccagagccttaaaatgcatttctgagaacaaagccacagatgcaatcagtaatccactgtgccttctcctgccccgccccattggagcctctgcctgctccccagctccccgctctctctgcctctcctccactcgcttcctaagaaagaagacctgggaagcagctcccttgttttggtggagcaaatcctgcagtagctttctgagaaagaagctgagggaggtaaaacatttgagaacttgtaggtttgaagcagtgttctgtactgcactcatactgattgataatttgactagatggggaattctaggtatgaagtcatcttccctgggattcaaaggcgttgctttgctgcctccagtggggcactcagaggtaatttctttgtggcctgtttctttctggaagcctcatgtaaccctcctttcaggatgatgtgtctggtgtgggcgggttcctttcattcactgtgctcctgggcgctgttattccgaaagctcaggtccttctgttctagttattttctttttattactgctttaataattcctcattttttttcccggagctcctgccagttcatgtgggactcctgaatggatcgtccagttgtctgttcccccttttttcatctctgctacgtgtgtaacttctaggaaacctctttagtttactttccagcctttcatttctttcaccacattttacttttaagcttgcttccattttccaggttgtgtttctttgtgacttcttccaggccctggctcaactctggtctgaaattcaaatcagtcagctctggtggtgtgtgacagggttggtggtaaacacagccactgttaaaaattaaatatgtggacttaaaatgaaacaaattatatttaaaaaggtaaaatactcagaactcattcctttctagtatcgtgtgcattctactgttatctgtgtggttgcagttactcgcctcttgtatctgagatggcagtgccatgtgctgggtgctgctgtgcacctctccccagttcagcggcatcattctgggagctcgaaagcagcatttacaccacagaaatcagcgtgtgctgcaagctgggcaccccccaccttaccccaccgcccacccccactgcccaccccgtggagagccagttgttacagcttgccagcacaccgttggttactgctcacctattaatagattccaaagtcacctccctcctccatttttatccttaaagttcatatccttttagagtcatttcattgggtttccagagagagttgaaataaatctctgtgttctcccatctcctggctctggactcttagcctggcctgaccccagcatgcttattgggatacgcagaggactgattgcagttgggggatctagataggaattagatcccatgtaaaccatatctctccaacagtgatccagcatctttggtatttgacccgaaatgaactgggccttgtgggtcttgcgtctctgctcctagccctccggtgtgggcacttacttccttaacgtgtccaggccatgaaccctcacagaggctgcttttgtgactggcaaggaactcctaggcctgttccttgttgttactgattttaatagactttattttttagatcaactttaggttcatagaaaaattgagaaggtggtacagagatttcccatatgctccttccccacacatgcacagccccctcattttcagaatccccccacagagtggtgcctttgctacagtcggtgaacccacataggtaccttatcacccgacatctgtatctggacattaggattgccagttggtgttgtacattctgtaggctcggacaaatgcatactgacatgtgtccaccgtggtagtatccctgccagcctagtttccctgccctaaaaaccctctctctccccagcccctgggaaccactgatctttttactgtcttcatggttttgcctttcccagaatgtcctatagttgggatcatgcagtatgtacttctacagattggcttctttctctttaatgataagcttttaaagttcctctgtgtcttttcatggcctaatggcttatttatttttaatgctgagtaacgttcccctgtctggatgtagcggtttgtatacccactcgcctgcccctgggctgtctccacggctggcttcctgtgtggttggcacgccttacctctgcaggctccgcatccgtcttcagagcgccttctcccatcccatggcagctcattgctgtttcttttgtgtgtatggacctttgcccagctgggggacatgccacgagagaggttgtttctgctttatccttgctgtgcacagcttggcactggctgggacctgggtctgggtgtggcttggaggagccaatgtcagttcattgggtttcactgggctgggactgcagcacatggaccaggccactggtgtccttgctgcatgcatgacaagaaccctctccaaggccctgcctgccgcaggcctgcctcctcctcctcctctagtggcgcgggagccagtgtgaagtctctcacaatgcgagtgtgcagtcctcttctgctttaagggatggggcagcctggccacgttgtcacttctggctctcactggctgtatgatgtttgtcacatggaacgggagaaaggacgcatccttaaaatgccaggggatcattgctccaaaaggaggggtagctggtttttaatgggagcttttctcttgagggactgtggatagcttgtcaccactgttaccatcctttcttatgtctgtcattgcatgcaatgaggactgagaagagcaagggcagcaggaccctggaggggcatgggatgtttgtgggtgccaggccctgggctggttgcttccacgcagccccactccagggcgtgggttctgtggggccaggacttgtttgttccaggcttagcaggagctccattcgtatttgtcagagcaataaacattattattatcagatgctaattgattagttatatagtaatatgatttagcagataattctcacaactttgtaggccaagtaggtcaacttctgttttgcaaacaaaaagtgacaccattatggcaaggagctgcaaatgtgcctggaattcagaagatctgaacctataatttattgagtcttcttcattgggagcctatgtagaaaccattactggtttgggagctcaaagtggagcagcttttgggagccactcctaattaccaatcagttatacagaggaaaagcctctcagatgaatgagactgtgcagtgggatttagaccggcaacttcagaacagacacatctggaaatgttctaagtggtgttgacaggcaggagagacagccgttacacagccatgcagaggggccgagccctgtgtgttcaggtgtagccaggacagtgcagtggagggagtgtggatgaggagcagttggatggaggtagagtagggttgtccatggccttgctggccatgatgaaaatgtgggccttattctgagtgatgagaaggtgttgaaacatttcacatggggaaaggatatgatctggatttatgataagagcatgactttggccactgctactttgtggcagtggactggagggaggttgtgtcagtttggaatggtatttgttggtaacaaaaatctgcaagcaagtaatttaaagattttaataattttattagcaagtctgcatagactcatagcctagggtctcataggctcttgtgggtttcacttggccattcttagaatgagacttttatcttcatgttgacagcatggctgccagagctccagccatcacattctagttccaggcagcagcaggaagagaaggactgagggaattgctagctgaatcagcctcctttaaagagctttcctggaattgccatctaataaattccacatacagtttttttggccagaactctcaccagagaagctgggagatatagtgagctgggcacactgccaacccaagtaacctcggaattttgttagcgagggtgcaggaacatggatgctggggcaggaagccagtgatctctaccatggaagcaagaggccaggatgagaggtgagcattgctcagatgagtgatggtggtggagatggacaggaggagacaagccccagatgtgtttgaggctgagcagcagcaccatctatggattgggggtgggggtggggttagaggtagatggggtcggcccctgactgctggtgcttttttttaggtggggacatggactgtaggaattggctggaagcagagtgaggttctgtttcggctgtgtctggctgggtgtggaaggcggcatgtggaggtggtagggaggagtggggttctagagtctggagctcaggggtgtggttgttccatgaccctcacaggactcctggatagaagggggagcaagggactcagggatcccaggttgctgttttgagtgaactgtttacagaagtgtaatgtgaaagtgcccaatcactgggtgcccagctcaggacattctcatagagtgaacccaggggtgcagctggccccagatcaaggtgctagacgcccttgggccagtcctgtggcgggttacgctgtggggcccagcaaaggtacaccaggacagtagccatgcagtcatcagagaatgttggggacatgagagatggggccaggaggcctgtgcatgcctctcccaccaccagccccacaatttcactaagcagcattaagcctgttcttttactaagggctgtttcttactgggcaaatcagagtgagttaccaccatttctatggtgcacagacttctttaagtgagactggaagagctagcagggtcccatttggggcaggaggtcagacactcctgcgtggtgaggcctcacgtgcgtgtgtttctacaggtgtacatccgtgcatgtgtgtgtgtacatatgtgtgcgcatatgttgtgtgtgtgcatgtgtgtgcactcacatgtacatcttagctctctctgcagcctctggtttttctggccgtttcctcgctgagcgttacaaaggcagagtctctaagggaaactgaaacccgagttctcttccttcattttcatctcattaccagctggacacagcagccacacaggaaggaagctgggcagccagccggccatgtgtgtctgccgggtgccccacaccaggtcccctccatgtgtctgtcctgtgttctgggctggtagctggaggagcgggaagcactgactcctgaagaccctggcttcgctttcctgtgtccgttgggctgtccacttctaagactctctttgtcccccgctgccttccgtattcctcagcagatggacccgggtgaggatccagggcaagcagaggggctacagagcagtgagaagcaggtcatcactcaccatgggtcctgccttttctttctcatgtccttccagcatttcttctgaggccctgaagaagtatcaagtgggctttgacattgcggtggtgagagcgacccctcctcacctggagaactgggaaatgtggattctcagggaccgcgctgttcacgagctccaggctgtgctgctggccctggtcctggggcgctgagccgcatctgcaatagcacacttgcccggccacctgctgccgtgagcctttgctgctgaagcccctggggtcgcctctacctgatgaggatgtgcacccccattagggggctgctcatggcccttgcagtgatgtttgggacagcgatggcatttgcacccataccccggatcacctgggagcacagaggtgagtgacgaaacctgcaggggtgctgatggcctgggatggggacctcactgcctgggatgctgaggtgggtggctggggacgggacagggaccccacttcctggaatgctgaggcgggtggctgggaacgggacagggactccacttcctgagatgctgaggtgagtggctgaggacgggatggggaccccacttcctgggatgctgaggcgggtggctggggatgggatggggaccccacttcctggaatgctgaggcgggtggctggggacaggatggggactccacttcctgggatgctgaggcgggtggctgaggacgggatggggaccccacttcctgggatgctgaggtgagtggctgaggacgggacggggaccccacttcctgggatgctgaggtgggtggctggcgatgggatggggaccccaattcctgggatgctgaggcgggtgactggggatgggatggggactccacttcctgggatgctgaggcgggtggctgaggatgggatggggaccccacttcctgggatgctgaggtgagtggctgagaacgggacagggaccccacttcctgggatgctgaggtgggtggctgagaatgggacagggaccccacttcctgggatgctgcggtgggtggctggggacgggatggggaccccacttcctgggatgctgaggtgagtggctgaggtcgggatggggactccacttcctgggatgctgaggcgggtggctggggacgggatggggactccacttcctgggatgctgaggcgggtggctggggacgggacaggaactccacttcctgggatgctcaggcaggtggctgaggatgctggcatgtgatctgttggattctctgctctgagaacttttgtctgagcagacaggcctactcagctgatctaagggagaggctgtgacaactgtagatactcagcaaggctcgtgcagacctcctgatttggtttctgaatctggggacccctgacaggaagcttccctccctcgtacctagtaatgttcgcggcgtgctgccaaagcacccgccccactgagcgtctgctccaggcgcctgagaagaacagtgaggcatcataagaatgctcgtcctacgtgcagctgagcctcatgccagctactttcctttcctgctgtttagtttttttttagttatttcttctcttggaggatgtgtctggggacccgggtttctgactcagtggattgagagcttacaccctgggtcctgagcaaggtgttgcttgcaggtggctgagagctgtcagcaatataggccattgttgtgctgagagagaggacctgctgcctgtgtgcatctctcttccacatgggaaaattagaacagaaagtatgaacacctgactctctttgttttttctcgaagtcagggtctggctctgttgcccaggctagagtgcagtgggacaatcatagcttactgcagcctcaatctcctggacacaagcagtcgtcccaccttggcctcccaaagtgctggggttacaggcgcccgccaccacacctggcccacctgactcttaaataaagcagactcttggtaatatgtaaaaagccaaggtcaaaatgctcaaattgttgtcaggacagttgaagaaacaggtcctaaaaaaaataatgctgatacatttatattattcttaagcagctattgctcaaatcttcattttcctaagtagctattgatacagtaacctaataagcaaagagacgtcacttgtttctctgtctataagtttgtggtggtgatcactgagaattgcattcgttgatggatatattctccaaaagaaattttgtgaagattttgaagtaaaacattcttttcctgaataagaaaatcctaagtcattgtattcctgtacacctaatctgtggatgacaaggcatgtagaccagagttgggtgggcagagggtgggagccatcacaggaagcatctggcagagcagggtttgggattctgggatctgagggagcaggaagggatgtccgactcacagcttcaaagtgagcacactggctccgggcttgagctctagggctgtgagtggttcccatgagcacacctgatggctacactgtgggtctggcgttgactgaggccacctccactgtagcagtgcctgttgcagcaacacatggccctcgagacatgactgcacccagacgtgctcattgtcactgagacagggacctaggatgtgctcaggtttaaaaatgcttccatcgctcttttcttcctcccactctgaccctgcccttgcatcccacagaggtgcacctggtgcagtttcatgagccagacatctacaactactcagccttgctgctgagcgaggacaaggacaccttgtacataggtgcccgggaggcggtcttcactgtgaacgcactcaacatctccgagaagcagcatgaggtacgtcctgggctcccctgcatgtccacatagcccagcttgagtgggcagcctctcctggccccactgtggggctgggggctgacttacctggagcctccattctgtagctgtgaccatgcagccccatctttgggtgtccaccagcagttcacccggggaccaccctctttgcttttttttttttgaactttttattatgaaaaaatctcaaacatacctatgagcagagacagctatgccatgagccctgtgcccactgcagcttatgcaaggccgggtgttcagtcttgcctacagtaccctccacctcctggggcattgaggcagatcccgacaccacattcttcatctgggtatctcttactggaaagggccccttgtcgtgcaaataatcaaaaatagcttctccaaaatttatatcatcatacattcagccagtgttcatatttcaccgactcttgtggatgatgcttgtttagttggttcaaacgtttagtttgaatcaggttgcaaccacgctgtcccaatccattgcagctggtcaccctgtccattcagtctccgcttctaggagccagcctcggtttccttcctgagaaagctactctgcacagcccatcccatgtcccactcttcacattgctcctgattcctcggtgtctttaaacattttaaaaaatcaaaccgaatttaaaatttgattgtagctcactgcagcctcaaactcctgggctcaagtgatcctcttgcctcagcctcctgagtagctgggactgtaagtatgtgccaccacacccagccccactcatggtgtctttagcatgcacctctgtcttcacatccccagctgggtgtcagatccaggctcatccctctcagggctgtgaggcgggcttctccatggaggcaggtgttcctcctcctcagtctcggtggcctttgaccagcgaagtctagatgctcttctcatcaaagattgcaaaacgcaatgttctgattctacctctccttctctacttgttagctggaaatcgtataaaaggggaagtgcccatcaccagctattttggtccgtagaggtcccatttcctttgggaaatgcagaatcgatgcttggaatctttgcctttatttaccagttttcagaataatgagttaatgagtcagtttcccctctgaagggcaagagtgagttttttgattgatttttagtgtcacaatgaagtcatagatttaaagatatttgctcttctttgacccatcacagtgaaacacctacctcatgctcaaatcgtcgcatccatggtcaacagcagcctgtttgggttggctcctgagacctcgcggtgtggggttagttttcttgctctctggaatctgttccaggttcacgctggacattttctgcccagatctctttttgttttcatctccagggtctagcttatttctcaatttctgtttgacacataaatgagctctgagcattatgctctgaaaacaagtatttggctgggtgctgtggctcacgcatgttatcctaacactgtgggaggtcgaggtaggcggattacttgagctcaagagtttgagaccagcctgggcaacatggcgaaaccctttctctacaaaaactgcaaaaaatagccaggtgtggtggctcaggtcttgggagtctgaggtgcttggaagtctgaagtgggaggatcacttgagcccaggaggtcgaggctgcagtgagctgagatcatgccactgcagtccagcctgggcaacagagcgagaccctgtctcaaaaaaacaaaaacaaagtattcagcactgtgaggcactctgagcagaaagatgtggtggtctcacctcactcagctcttactcttcgcgtgtctgttaaattctcttcctctgagcgccttcctgaccacacaggctcacactcggtcttgggggaattgtggacagtgtgtttgtgctggccccacaggtgttcagtgagagccagacattgctctgttaatgacaccatggtggtccctcggggttggggagaggcttggggacctcttatacttaaaagaaaaaaataaagagacccccgccaagcatcagtgaaaatccctgcaaacgtgatcaagagtctgttgaagtgtacgttcccttgtccttatgcatttcatgcgagttgacgaaatcatctgtactttaaatgctgaaggaagtggctattttaaatgagactctgttccgcttttgtgtgcccctatcaggacttccatttctatgaaatgacactcccttagtactgtgtctgcagcctgggtgctgttcaggaactcacagagttagttagaaacctaaagtggggttcctctcctcatactctccctcctagaagccctgtgtgcttcctaacctctgagtcctgacacctgctacaagccttttggtggagaaaaatacattgttactggtttcttttgcatcagttatggaacatcacagagagagggggcattttggggaaggtgaggcagagatagatatagaaaccttcccttttgtcttatgttgctttctattctgtgggggctttggagggcaaggggctaaggcccccaccccctggaagtttctgatcacgaattgtccctggtttgaaagaagaggtggtaggaacatggatcttactaagatggtgcctgagctgagctggtggtgttagttcatcacttcctcctgctgccaacatgcaagtttaaggaatcgtaaatctccctttctactgatacagtgaatattgtggcttttttttttaaactggactgtagagtcactttttttttttttttttttttttttttgagacggagtcttactctgttgcccaggcacacgaggctggagtgcagtggtgcgatctcggcttactgcaaccttcgcctcccgggttcaagagattctcctgcctcagcctctcgagtagctgggattacaggcgcccgccaccactcccagataatttttgtatttttagtaaagatggagtttcaccatgttggccaggctggtctggaactcctgacctcaggtgatccgcctgcctcagcctcccaaagtgctgggatcacaggtgtgagccactgcgcccggcctgtagagtcactttgaatggatggaaaaaagcccactttgatgtttgaaaatacttatggtttaggtttttgaaaaataatttaattttctccactttcacgagtttgatttttgctgctgttttatggtgagtgatggaacttttggagctggtcttccagactccactggtttcaggataaggatcacagtgaggatgttcatgaaggccccaggctgctcccctgctctctgaacctcccttgcagtctgagaattgatcatctcaggagaaacctctaggctctaaactctatcatgtgcttttaaaattgtgcatttttatactagtatctctttaaaagaatatgcactgatatggactctatcccaacaggtgtattggaaggtctcagaagacaaaaaagcaaaatgtgcagaaaaggggaaatcaaaacaggtaaatttcttttgcaagctacaaagaatcccattcaagtatttcttggttgttttaatctactgaatgccagcatgcctgcagtgcaggccagccttttctccaggctctgttcattctgctgggcttggttttgttgtgatgcgtcttggagctcatccctctattcctgagtatcaggattgggtttctcaaagcaggtgccaaacatatttggcctttgagaaatacttttttaaagtttatatgaattgaatgtattcagatggcctgaaactttgactacagaacactggtgaatagtgaagcccactggtgaatagtgcagaaattcagggtttgttctgcttccttgcacccagaggccttaggcttggaggagttgctagtcatgcagtttttctcaaccccttcgttggacttgcgacagagatgccccatttattcggcctgctgtgctcaacctcttgcaggagggagcacatgagtgagcaagtgtgggatctggccagctgttttgggtgccagcaggagcaggctttgtgtgagccctgagggtggcacccaggttggggtgcctgtgacccccgcagccccagagggtgcgttacagtgctctcttatctctgctctccatggacagtggtgtgttataagctcagtgggccccttttctcattgtgtgggacagctgtcctctgccagtgagggcaaagggccagtatgacagccttttttgggtacacacactcagggtcctgagctcttgtccggcatccaagaagaatgaggttgcatggacacttaaaggatggtggagtcagagaattttgtttagtgttggaagtggctctcagcggagatgggagcttgagagggaacaggacgagcaaataatcttccctgaagtctggccagctctggccggctcttctccaaagttaagccatttctccaaaatccagccatccctctgaagtcaagtcacctctctctagtccagcaccttctcttctctatcaactgagtctgggctcttataggcacaggatgagggcagggtgggctgtgggtagtttcggaaaaggcaacatctgattgtaaaaagatgttcagaaagaaccaatcgggagacggcgggcaaacagggatagaagttctcactctgggctgcgggttttaggctttttggctcacatgtggggttttgccagggacctgcccctgtctgcctagactttctctggctcctttctctatcactgggacttttggattcttggcacacgtccgtccctttggtccctcaggcccctcagtgtggtactcattcagggagccctgggccgaatactcattcccgtctgcagctctaggttaccctcatcaccctctgagccatcatgtccctacctggcactgggcattcttcctcaatggtggtcaagacaagctgagttaaaggcaaaaaaagaaagaaaacccaaagaagtctatgctaaactttcttagcaaaatgctaaacacttgcactgaagtctttgtctctaaatccaaagttagattaggaaatgagaggaaaagcaggtggtgcagtgtagctccggtttccgggggtgtgcaggtgggttggggtgaatagtgaattacttccaaccagtctaaaaaagagaactctcctaatctgggataatttcagactatagcacatgtaacgcaagtacttttagcctaaaatagtgggttctgaaatggtatctttgttttcctgcttgggcctttctgatgccaagccgggctccaggctctcctagtgcagccactcccatgggggctggactgggaccctgggttgggtagacctagtgtcgctgttcctagttctgtgcaagttggaggcagggtggggtctccagaaacagagaggaaattctgtagggtggacacttctccaggcctggcaacagaacaagtggtccacgtacttagcaagagtaaaatatattgctttcaacagtgggtgtcccagtaagatttgaggtaagcattcattgagttttttttcagtcaccacatctttgctgagtatcaattagggactgaaacaaaatcctgtttggcacctgaacagcatgtggacactgcagagacacaattactcaggccagtttcagctttaggtttgcctaggggtggggttggggtctcagtgaaccttccactgtacgagaacaggccagtgtgtgaagaggagttgcagagggtctagatgacaagacaaggctgagaatgcacacatgcctcgttggcctggggccacctgtgagctggtgttggtgaatgtgggtctgtgcccctgagatgaacggcgtgagcagtttgaatagtggagggcatctgggctggacggttgctaatggtgcatttctcttccctgcagacagagtgcctcaactacatccgggtgctgcagccactcagcgccacttccctttacgtgtgtgggaccaacgcattccagccggcctgtgaccacctggtaaggctgatgggcacctccctgtgctcacgccagcctggtcagcagttaaagtagaagggggctcaaagcagacgtaaagctgtctccaccctaaaaaaaaataggattttctcagagccagctgcagaaaacgggggcagcttgtggcccctctgaaagtcttgcacagctgctgtcaggggcacacagcccacttggctcctctaagtttcggtgtccatggccaagggtgaggcctggggtgcagctcaaggtgctgggagcccttggtgctagtgcagagcatgccatggaggggcgtgctggaaagtacagacagcctgaacatggcattggggatgtgctgggaaggacaggtagcctgaacatgctatggggtgaggggacgtgctggaaaggacagacagcctggcagctctgggcatctgggtcaggtggaaaagtcaggacttgctcctggcttgtgtgttcttggttggtgcatctgtgctctggctgtgggacccacccttctggtcggctgtggtgtgcagcttgctcactgaaccactcctgggtccacccactcaggggcagcaggtcaagtgtgctgagcaccttgagaagcaagtccggcctctgtccctcaccggctcacatccttgactgcccagcctggtatccggcacctccccctgtgtgacggtcctttctatccagataatctgatgagcaatgtgatgatcatcagagagggagaagtagcattttaaataagtccatgtgaacatggaaaatgaagcacattttctactgtgtatccctggattttaatgagtcctgataaatgtaaaatatgccacagtgaaaagcatcatttgctagaaccctaaattaattggaattaaaatattttccaatcttgagtcagagataaatgacaagacaacgtatggcctcattagagacttgatgaggaagcctggtatttgcacacagacgtctggggtgagattcatagtaggggtctacccagctgcctgtaccacagatgctggcaacgaaacctgatagggggtgggggtgctttggggatagtaagaccctcagtcctcaaagacagtcgtttgtatttacttttgtgcagaaagtacggttggaccagaaacattttgcacaacaaaggatttttctggctaaactcaatcagaagcttaaagttctgtcatttaaacttacattctgtagataggttagctgttgaggttagaggatactgtatttggtttaaatttagacctataatttttcctaatttttttttttttttgagacggagtttcactcttgttgcccaggctggagtacagtgatgcgatctcggctcactgcaacctccatctcctgggttcaagcgattctcctgcctcagcctcccgagtagctggattacaggcatgtgccaccacgtctggctaattttgtatttttagtagagatggggtttctccatgttggtcaggctggtcttgaactcctgacctgaggtgatccacccgccttggcctcccaaagtgctggtattacaggcatgagccaccacgccccgtcaatttttcctaatatttttaataaaagttttcacagctgcagaaaagatgtatcacttgtatatcctggcaacctagattgcacaattgggagtgtgtgtgtgcacgtgtctgtgtgcctgtgcatgtctatgtgtccacatgtgtgtctgtgtacatatgtgtgcttgctgaactatgacccgtgactcccaaatgccttcacaggcatctcctaagaatagtaacattttcctatgtaacttcagttttatcattatatctaagaaaacgttcaatcattccccagcatcatccagtctccagtccccgttcagatttccccaacagccccgaaacctcctttcaaggtatgctaaatggtcacatccagtggggttcacattccctaacctaacaggtgaagagctgtgtgctgctttaactggcctttcaagggtgtcagctgcggccttccacgtggtctgagccttcctgctctgcttccgagagcgtgtttccagccagcctcctgcagcagaggtgctgggtgcccttgccccgccgtgggccctgcctgtcttcagcatgcccaggctgttggctgcaaagtggcatccccacgcgtgttctgtgtgctctctggttcccggcaggctcagcccctctctcgtctgtgctgtccagatgggtttcttctgtcacttgctggattttgcctgtttttctcctggatgccctttctcactcgtttgtccacacttctcacatgttcagggatggagacacctcatctgccattctgtaggcatttcccccagtttgtcacatatttaaccttgccgtattatttccccatgtggaactttccagttctctctgtggttggatctgtgcattgttttcctcatgtggctgtgggcactctggccaggtaaagagaggacccccagatggaaacgccagcccctgctctgttttagtacagtgcggttctgtttttagtattcagatggttgatccatctggagtgtgttttggtgggtggagcgacgtagagattctgcctgtttatgtttttctgcttcctatttattgggtcacctagctgcttagaatgccgtctttattgatgttaaaattctgctcatgggcttccgattacatactgagcacgtcctgtgttgggtttatcctggtggctttccagccctagagccatcagcgttgccatttccattttgcagatgagtaaattgagggtctgagatcttgagaagcttggccagggcaacggagcaagggcaccaaggtgctgatgtctagacctgagctgagcaacacaagccctggccctagtgggcgggactcctgtagctccacacctatctgctcggccctgttggtcttccgagaagagcaaatttgtaaaatgaagtggtacagagacacattgttactatagaaattcagccatctgatgatgtgctctctttttattcaattgtagaacttaacatcctttaagtttctggggaaaaatgaagatggcaaaggaagatgtccctttgacccagcacacagctacacatccgtcatggttggtgagtcctgcccctccagttccttcaccgtgaagattacagtggcatgttaattaccaaacaggatatttggatcttctctgaagtgctgtcttccttggctttgtttaaataggagctatccttacaaaaggcacatgtgactgcatagaccctttaacttttgaattcattgtttgcaaggataatagccgccatggtaaacgtcactttgtatccattgctggctcatgtcatttggataatccccgcgtgctgagcagatgctcctgtttgagagtaaggttttgactgagccacatgctgtctgcagtggtctctcacctctgagcaagtggtcatagcctggtgtgtacccactgttgcatctgccagcattttcctggatgtgggaattccttgctcatgtttacttattgccccatgactcttaaaatgcagctgaacatggagcatgaaattatccccatcaaagtgagagcacacctgtggtcctagctactcgggaggctcaggcgggaggacaggagtttgagaccagcctgggaaacagcaagaactcatctcaagccaggctcagtggctcatgcctcgatcacttgaggtcaggagttcaagaccagctggtcaacagggttaaaccccatctctaccaaaaaatgtaaaaattagccagacatggtggcgcgcacctgtagtccaagctgcttgggaggttgaggcaggagaattgcttgaactgggaggtggaggtggcagtgagccaagatcgcaccactgcactccagcctgggtgacagagtgagactctgtctcaaaacaaaacaaaaaaacctcatctcgaaaaagaaagactagaagacacaggacaccccaaaagttgaggagactgtctttccctttccccaggcagggacttaattgggttataaaggaaaacaccgtgttgaatgtttgtcccagtgttggtgccatagcctgagaggttggttcccttttcctcttttcttctgggcccctgcagatggagaactttattcggggacgtcgtataattttttgggaagtgaacccatcatctcccgaaattcttcccacagtcctctgaggacagaatatgcaatcccttggctgaacggtaaggaagagcagtgcaccttagtgggaggtgcgtgtctcctcatgagtgcacacctgttgatctctccttttctgtctctgagccctgggggcccccgagcttgtgttagcccctgtttgtgggggatacttcccaaactgtccagcaatggccagagtcccagggcaccttgttgggtgttttcactggtaacagagtactgttttaagacagctccccactaaccccccaaaaatggatttgggagactctcataaaattgagaatctgatagtagatggtaaactaagactaatcagatggggacatggtataatttccagaatgatattaaagtgtggcaccaacactggtgtgggacctgcctccgggcccagcctctagtgcccggtcagatgggctctgggtgccttgttgctgccagcagcacatgtccgatgtccgtcttcaatgtgcaggaagaagctggtggctgttcatgggggcttttcttgtgggtgccagccagtagagccttgggttttgaacctcttgaccttagggcagatcccaagaccccagattcagggacagtcggccattcctcagggtggggcaggatctggtggttagagtttgtttatgtgaagcatgtgttgtttaaaccagcaaatgcatgccttacgtaggtctctgatgctggtaccatctggctccctgccttccagtcaggaggcccagcctcagttcttggggtgaacctgggtgggatgcactgcagaaccactgtcgggggcacctctctgaggccgaggaggtcggggtagggcaccatctgggctcagggctgtcatcatcctcagatcctggagtttctgtttggattgtggcatgtgcacactccagacatccttgcagggaagccctcaggcccccaaggtagtgttggccggcctcgtgacctcatgggtgcaggcagtcccccagctctgtgttctgggataatcactgtcctctctctgcagagcctagtttcgtgtttgctgacgtgatccgaaaaagcccagacagccccgacggcgaggatgacagggtctacttcttcttcacggaggtgtctgtggagtatgagtttgtgttcagggtgctgatcccacggatagcaagagtgtgcaaggtgagtgccaggcactctggcttcgcttggcccctgccatggcaatagtgtgcctggatgatgggtggctcctgaccttcgtctcaaatgtcactttccctagcactttattcccttgggcctcagatgcagctctcaatggatcttatttctgggggttgtggggactgagggagtgctggcccccatgtgtgacccattagcctcctcttctcaggaggttctttcttttaatgcaccctcttcaaacctctagcttataaaaagcaaggctttgtggaatgtattcaccagagtctgttggaatttcaccatttggctcttaatctacctaagagtgaaacattaaccgacagcttaagattaagaagagagaaccaatacagaagtttgtcaaaacacaaatctttaagtacattaaaaggggagggtgcctttaaaatgacacactgtaggcacagtgctcagcacaagagaatggcctatgggcttgattacaggaaatctcaaggttgctcagtggcagtttccaggaggtggattgtcaggcctcaggggagctgggggaaaccacatgaaacacagccgccatgtccctggccaggagctcatctcggagcaggtagccattcgtctctcatggaaattggtagatagttcttgcgtggccctttctcatgtagtcatgaccatcaggacatcagagaagcagggttcctttcatgcctatggcgcacaaaagtgggtgcctttgacaccgttcccttaacagccccttgcataaggaagaaggttgggtgatgtgcacacctgagtatccacctggtgctttgctccctgcccaggccttccgtagccagggctcactgaccagatcctccagctgccccccagccgtggctgccatgctcctgtcttgcagaccaggaaaccatcctatcaacagtatcagtgttgggggcaagccagtgccccttgagatggggagggtgctgcagggccagagctcctggcaggcgtgcacagtgctcagaatgctgtcagagcagcactggccaggggactcgagccctcccctgccatcgggaagccaaggatcagacttgccttgaccttgacttattacccagcactgagggtttgcagcaggatcagtgagcagattcagcgatgcacagagcagccacctccacccccgacaagtttctacaagtcttaggcacactgctgtcatcccctctgatcccttttttttccccatacttgtttgaactcctggactagggtggtttgagcttaggccccacagctcctgcctaccacgcaggcacacatgaacccttcacctgctgcccgtgacctgaaagccacatgagacccctgacgaaaaatgtgctagaaattattctttgctaaaacatcaaggaggaaaatgaagtccttttatcaaaaagagaatttgggctcctgtaatcacacagcagagatgaagggggaacattttccctgtgtccaaaataagtaaggctgcttctatttcatattcttctgcactcaggttttgtggtttcagtatttctctccagaccacacacagtcatgtgtagtttataattgtgtcttggtcatcggatccctgaaaagcgtttataaagaacttaggttcaaagcactttagcagatactttgggtagaaaggaagtgaaggatctattcctttaaagggaggaaggttcacacatttgcccaagacaggctgcagggccggtggctgtcccctggaaggaggctgccgccacttgccccacccagagcatgttcattgatgggccctatgtcaggaaagtcacacaatgccaggggccttggcagttggaagtgtgtgagcacggcagcacctctgcggttgcaggactgaatgctgggcacaggcaggcatggacgatcaaatgagctttcagtgagagggcttttgtccgttttgttttgtgtgttaacccaggagcgttctgggatccaagctggaacctggacgtggtgctgcgggccactcacataattgcggcatctgtctcctgttgcccgagctttgtttcagtcaggcacagccgcgctgtgctgggccatggaggggtgcacctctgaccttagtgcttgctcacaggggatccactctcggcccaccacgtcttcttgttggggttttagggggaccagggcggcctgaggaccttgcagaagaaatggacctccttcctgaaagcccgactcatctgctcccggccagacagcggcttggtcttcaatgtgctgcgggatgtcttcgtgctcaggtccccgggcctgaaggtgcctgtgttctatgcactcttcaccccacagctgtaagtgccctgggtggagtccccctccttgctccctcgatgccgccaggtggtcccgtcacctctttcccctccccaggaacaacgtggggctgtcggcagtgtgcgcctacaacctgtccacagccgaggaggtcttctcccacgggaagtacatgcagagcaccacagtggagcagtcccacaccaagtgggtgcgctataatggcccggtacccaagccgcggcctggagcggtgagctggggcactgggggcgggccgtgctttcccttcaaggcccagggcatggaatccagtacaggcactggggcctgctcatgggctgggtacctggccacgccaaggctctctgcattgggacagggacggccgatgagcacagctcatccttcttcccttttgcatgttacgtaacagccattgctacactattgcacaaacaagaaggctggggcagctgttttgcacaattaacattgcataacaattaggtctgtttcattttcagtttcttacagagaaacacatgattccttggcaaaggcctctgcactgtccactagtcaacaggagtcacattttttcctcctaaatatagtgaactttatgtagaaattgggaatttccaggccgattccttccctcacatggggaaatgggtgtgacaggcatgtgcacagccctctgtggggctgtgacctacatggggtgtcctggccctcagagttcactgcagcaccagctccctcccaagggcagctgtccctgacaccatcatggctccttctatgcatagcttcgtaaaatgtgttcactcatggtcacagattttggtttacacacatcagggagctagaacaggaaaaaagaatccctcaggctcttatgctattttaaattgtcctggttttagccatgtttagcattcttttcatgagaaagctgcaaatcagtgttctgttttttaatttcaaaagctcaataagtgtttttcacttacaaatagatacaaattccttccctgagtatgtatcgtgaatgcaattctgtcttgcagatgtgttttataactgtgtcctctgctggctggggagaggccacctttcctcatagtaaagttattcactgctaccctcatttcaaggcatgcattgtgtggtttccaggttttgcagccccccctgcgttggctgcttgtgtggaagcacccgttgcgtggtgggacacgagcacgttaacagcggggattttctccctgcagtgcatcgacagcgaggcacgggccgccaactacaccagctccttgaatttgccagacaagacgctgcagttcgttaaagaccaccctttgatggatgactcggtaaccccaatagacaacaggcccaggttaatcaagaaagatgtgaactacacccagatcgtggtggaccggacccaggccctggatgggactgtctatgatgtcatgtttgtcagcacaggtgggttccgagggcttggcaggcttgacagtgacagcacatctgtgtcctctggtaggaaaactgggaaatccaattattctttcgtgagtagttccattgcctccctcgaggtgacctgggaggtttgtgggagcgtaagaagatttctgagaagtcaccacaccaggtggctttcagatctgggaccaccaggctactggaggtacttgttaaaaataaaaatgcaagtcctggcctgtggctgggctgggctggggcagaggagtactggccgccgaggagttggggcagtgcccacgcagggggcaggtgtgagccacctgggaggaggcgtcagcctggcgtttcctgactgctggcagaggaccacgtccctgcttcctggccgaggagccaggttttagatgtgccctggcatgtggactctgaaataagcacttctggaacagggacaggggccaggagccacggtggctggcagcgcattgtggcctgcccttggagcctcccagccaacctcacatgccccctgtcctcaccgcctgcctagggcacttaccagtgacaccccgagggctggtggagcatgggagccccctcatgtggcacttagcctcaagtgtaatgtcgactgttggtgaggattcttggggtcaaccatggaacagtttattttccttggaaaaaaactggaataacccataacacttgggtttccagttgtctgttttgccaaagccttttcctttttttgtttctaatgcgaaatcatcattgttttctaagtatctgtggagggaatgacttgagagtgaagagtgtgaagtttgccgctgtggtcactgtccttggtttctgtgtctgggttagtgtcactgacctgtagctttggccctgcagaccggggagctctgcacaaagccatcagcctcgagcacgctgttcacatcatcgaggagacccagctcttccaggactttgagccagtccagaccctgctgctgtcttcaaagaaggtaaagtgacgcaggcagctggaccgggggcttctccgctcggtggctttgattctaggtgacaggagagttggcaagctggagtcgggctcctgggcaggcccctctgtctgtctgccctgggtgagccaaccttcagagtttgacacagagccattccgtgagctgtgggatctgaattggggaaggcaggaaggcagacctggggagacgggactttctcttcgaagttgctggaatgtcattgagttgttggtgcagctttacaggctgtggagaggtgggcactgctccatgaagacacctttttatgccctgagcttggggggtgtgcagactgcatctgtgggatatgatagtgatacagctgactcgtcaccgtggaaaatccacaagagaagtggttcgtctcatctgtaaagctgtctccacctgtggctgagactctggtctggcctgcaatactcccaagcagcccttggcaggggtgggtgggcgggcatccacgctggcctttagggggctgcctccctggccctggctcctaacgggacctccaaccaccttgtgggatccaggcccagtcagtcctctcctccctcagctgggagcaacaggcagaggaagagggcccctgtctggccgggtaagatacctacccttggcaggtgcgtatttgcaaacacccctccaggtcttctgtcctcttccctcccctgtatccacaaagcttgggagcctgggtccttttacgtggtcacctcccctctgctaatggagagttctccctcagatctgaaaggaaaagagaatgaaatagcctgagcaagttataagccactgggtactggcatctgttcaccagcctctcggtctccaggacacaaagggagccctggagatttgaagggtcgacgctttagccactgtggggcctcaccccagcctcgttgttgaaagaaggggacccagaagctcttctggggccatcgtgctgttcagtggcctcagccagactgggcaggcacctacaacatctctaaaatgtggacttctcattagaatgaagattgggcccctggtgtggacattcgtgagaatgacactctgttccaagggtcacttagggacccaggctggtggaggcttccagggcacatgggcactgatcctcaaaggcagaagggggtaggaagaggagggccgcacagagggggttacgggtcagtgcccacccgccatctcccagaactcggtcacatggccacaccagggcagctggccacacagggagcctcgcgcccaggaggaggagccagtgggtttggggaagcgcttgctggtcctactggaccacccgacccgcctgtctctgtaggagcctccattcgtggggacgtggcttagttgcctggacaagcggaaatacatcctgcctgccgtggggtcctgtgccttctccttgggcctcagtaggctccaggtgggggtggaaggcccagctccatggccatggcagcaggaagtggctgttcagtggtaaaaagactgtgccgcctgaccccatcaggctctctcacggtgatcagcaaatggagaaacggccagtaccacgccctccccctgtcctacagctggggaggtgcgctgtgcctccaccctcacctcctctcccctgatgacaagcatggggttttgctttttattttggtaaatacacatcagatgaaatttgccgtcttaaccatttttcattgtgcacgtcagtggcattaagaacattcacgttgttttgcagccattaccactgtctgtctgcagggtgcttttcatcttcccaaacagaagctttttacctgtgaaatacaaactcttcattttcccctcctccagccctgggcagccgccattctgctttctgtttctgtctgggtacctcatatgagtggaatcacacagtatttatccatttgtaactggcttatttcacttaacataaagtcctcaaggttcctccctgctgtagcaggggtcagggttttccaaggctacatactcctctgtcgtatgtgaataccgcattttgtgagtcccgcattttgtgtgtgcgttcatcccttgatggacacggttgctcccaccttctggcttctgtgaacagtgctgctgtgaacgtgggtgtgcagatacctcaagtccttgctttccattccttgggcgcacacagcagatgcggtttgctcggccctctctgagcccaccgagtaggctgtgtctgtattttcaccaggactccttgggatgctgagctacagctagcgtggcagagggcaaggaaggcacttagacagctcagttgcctctgatcacgtccaccgtcactccaacctgccctcggggtctgacgcgcacacacagcagcagagacagagatgggagcatgagagctgcctgcaaggggacaatcctcaggcccagggaaggcggagacagggggcgtcgaggggcaggagtgcacaggacaggcttgctctcagcgggcctcactcatgctgccaggtgcctggtcaggctttttttctttgcctttaaaaattttgtcttgaaataattttaaatttacagaagagttttgatgattgcacagaaggatcttgagcgcccccacctagctccacatgtccgatgtctcacatagccagtgtgcatttatctgagccaaggtgctgtcatggtgcagtgcgttacctgaaccccagaccctggaccctcctacctcccgcccaccacattcctggctcagcacctcaggttgcactggacactgcatctcctcggcttctgctctgttcctgcctccctgacctcagcactcctggagaggagtagtctggtgttttgtggtgtgtctggtgtattcttgtgattatcttggggtcgtggttttagggggagcaccaaagagggcgctttctggggatggggcatctgtatgactcgcaccagcgtgatgaccttggtcattctgtccaagtcaccaccgtctttttccatgtcgagtgtgtcggggcatgtagtccacactgggggtgggggagagtgagccccacctcccaggggagtcatgtgggaaacccccacagtcattcatgcttatttgtagggacagacttggaggctacagaaatgccctgttctcccacccactgacatccacattgaccagtgggtcctgcctgcagcagttacagctggctgtcctgacgaccagttcctccttccctgtcccctcttcccttccacagtcatcccttggtctctgtgtggcgtcgtttagtttttaaagcttagtttcatttgggctgcagcccagccccatccgggagaagcggaagctggggctgagtctcccgcagggtgcaggaggtggtctggatccccttgggacaggccttgccccccagagcccaccccaccctccacagctaccctcaagcctctctttggggtgaggagtcaggcgggccccacttggccacccagggcaccctgctctgcactgcatggtgttcacgccacctcgcaggtgccccccgcgggacccaacaggaccagctgtcccttggaagttacccagcttggctttgctgccagagaatgtttccgccacctccacaagccgcgcgatgcccgaactgtgatctgggatgtcatcctcaatccttcccacaaacgtggctcacacatggcctcatctgcccaggtctctgctgctgctgctgctgtgaggccagcggcgggccaggttccctctgctgtgtattatcacagtttccatccttgggggctttccctttctctcgtgggtctgtgtccgcacagctggatgtgtggcctggggcttcctgtattggcatcagggcctgtgatcttccaaccacactctgaagttgactccgagcgtatcctctgaggatgaaggtcgtgtttcatctgactgtaaaccactaagtcatgtgtaaatttgggaatcttgtattgttaaccaaaaggtgtccccaggctgttgaggcagatgccctgggcagaggctagagagcgcgctccacgggccacctccaggtctgttgcacgcccccgagcttcaggtgggtgcactgcatgtggggcaccctccttccagctgagttccgttcaaaagcagtcagcagccctggatgcctgtgtgctgggcactgctggtgccaggtgggctgatgggatggacctgaagctggtgtcactgggaaccaagtgtcccagaaggtgggagagtctcacctgccctctgctgtgggtgtggctgctctggagctcggaggttgacttcccgtctgtgagctcttcccttttacatatagataagtgaaaagcaaaaggcattgttccttttttatgttttgtatcacgatctcctcatcctttgcatgtcgtccgtttggcatccctgttatgttaggcctctgctggatccagaccctcacgagaggctccccgcccacaggtgctcacattctggctcgggggacgaggttgggcttcgaggtggtgtgcttcagcctctggctgcagccccttctcacctatagtgaggccgggaagatgaccgggagtgccaggctcatgcatcctctgctgcagggaggagatctggaggtggggactgaacagcctccccactggctaagagaaacacgtgcagagaagcgctttgctggagggcaggcacctgtgggtgcccagacaggggagagagggatttggacctaaggcccagtgagccctgacatagcacgtggattctgcaggaaggtcacagacctgccttgtttgcctctggttctgagtacctctcctccttactgcaatgtcccctgaaggtacactctggctgcttcccacacactggtgcagaagcagaggccatgctcctggatgcctgcttgcctgatgctagttcttctctgtctcatacacgcagggcaacaggtttgtctatgctggctctaactcgggcgtggtccaggccccgctggccttctgtgggaagcacggcacctgcgaggactgtgtgctggcgcgggacccctactgcgcctggagcccgcccacagcgacctgcgtggctctgcaccagaccgagagccccagcaggtatggggcgggatgcgctgcctggggatgtcccccatgtgtgtgggtgaataacacgtgccggttgttttgcaggggtttgattcaggagatgagcggcgatgcttctgtgtgcccgggtgagtgactcctcgacgtcccatttcctttgggagtggcgaggtcttgtagccatttcacggtgcttcagttctgtggcatttgtgtgtgttttgtttttctttctccactcggaacagaggtcaagtgttctgtagcagactcgtggtcttctctgtctttttttcttgccgaaagagtacttgaagccacttagagtgtatctgcttactgggaagcagtctccttccaaaaccatcctgttttctttctgcttagcttggggctcattaagcaaaacctaagcctgttataaatggggagaaaggagcccatgagtgattaatcctcaggcagtgtaagggctggggtggtgtttcccctggggctcccacctgggattcacccgcctgtggatgtctgaaatagcaccacacccagagggaggggtggcatcaggccagatgccccttccccagcagccaccttccagggtgctaaaggcagacttgaccctcagttctgtgtcttcctgaccctgacaagacagctgtcatcagactaagaaaggtttaggcagctgggcatggtggtacacgcctgtagtcccagctactagggaggctgaggcaggaggattgcttgtgcccaggggttcaaggctcagtgagcttatcatgccactgcactccagcctggggtgacaaagtgagacccagactctaaaaagaaaacaaaagctggccgggcacagtggctcatgcctgtaatcccagcattttgggagtctgaggcaagaggatcacttgagctcaggagttcgagactaccctgggcaacgtggtgagaccctgtctctacaaaaaatacaaaaattagccaggcctggaggtggtcacctgtagtcccagctactctggagactgaggtgggaagatcccttgagctgggggggttgaagctgcagtgagctgtgattgcaccactgcactccagcctgggcaacagagccagaccctgtttcaaaaaaaagaaaaaaaagaaaagtttaggcaggaggagagtgctgagatgcactgaaaggccagtcttccttgcagccattagcagaagcgtctcgtgtctgattcaaagagctgacactaggcacagaactggcctctgctcagcttccccagcctgacgcgttttcttctgggacacgggtgagaaatgggatttctgctgctcagagctgcctccaatttctttgtccccatgggctgtcatccagggctcatctttgctttttggtcacgcatgtctttatctccttagttgttctggaagattccatgttgctacagtgggtgaaactcttgcgtcatcttgtgggtattttaaagaagttgttaaatagcaaatggggattgttgacgctgtgcacgtttattttgatgttccagataaaagtaaaggaagttaccggcagcattttttcaagcacggtggcacagcggaactgaaatgctcccaaaaatccaacctggcccgggtcttttggaagttccagaatggcgtgttgaaggccgagagccccaagtacggtcttatgggcagaaaaaacttgctcatcttcaacttgtcagaaggagacagtggggtgtaccagtgcctgtcagaggagagggttaagaacaaaacggtcttccaagtggtcgccaagcacgtcctggaagtgaaggtggttccaaagcccgtagtggcccccaccttgtcagttgttcagacagaaggtagtaggattgccaccaaagtgttggtggcatccacccaagggtcttctcccccaaccccagccgtgcaggccacctcctccggggccatcacccttcctcccaagcctgcgcccaccggcacatcctgcgaaccaaagatcgtcatcaacacggtcccccagctccactcggagaaaaccatgtatcttaagtccagcgacaaccgcctcctcatgtccctcttcctcttcttctttgttctcttcctctgcctctttttctacaactgctataagggatacctgcccagacagtgcttgaaattccgctcggccctactaattgggaagaagaagcccaagtcagatttctgtgaccgtgagcagagcctgaaggagacgttagtagagccagggagcttctcccagcagaatggggagcaccccaagccagccctggacaccggctatgagaccgagcaagacaccatcaccagcaaagtccccacggatagggaggactcacagaggatcgacgacctttctgccagggannnnnnnnnnnnnnnnnnnngacaagccctttgacgtcaagtgtgagctgaagttcgctgactcagacgcagatggagactgaggccggctgtgcatccccgctggtgcctcggctgcgacgtgtccaggcgtggagagttttgtgtttctcctgttcagtatccgagtctcgtgcagtgctgcgtaggttagcccgcatcgtgcagacaacctcagtcctcttgtctattttctcttgggttgagcctgtgacttggtttctctttgtccttttggaaaaatgacaagcattgcatcccagtcttgtgttccgaagtcagtcggagtacttgaagaaggcccacgggcggcacggagttcctgagccctttctgtagtgggggaaaggtggctggacctctgttggctgagaagagcatcccttcagcttcccctccccgtagcagccactaaaagattatttaattccagattggaaatgacattttagtttatcagattggtaacttatcgcctgttgtccagattggcacgaaccttttcttccacttaattatttttttaggattttgctttgattgtgtttatgtcatgggtcatttttttttagttacagaagcagttgtgttaatatttagaagaagatgtatatcttccagattttgttatatatttggcataaaatacggcttacgttgcttaagattctcagggataaacttccttttgctaaatgcattctttctgcttttagaaatgtagacataaacactccccggagcccactcaccttttttctttttctttttttttttttaactttattccttgagggaagcattgtttttggagagattttctttctgtacttcgttttacttttctttttttttaacttttactctctcgaagaagaggaccttcccacatccacgaggtgggttttgagcaagggaaggtagcctggatgagctgagtggagccaggctggcccagagctgagatgggagtgcggtacaatctggagcccacagctgtcggtcagaacctcctgtgagacagatggaaccttcacaagggcgcctttggttctctgaacatctcctttctcttcttgcttcaattgcatacccactgcctgcccagactttctatccagcctcactgagctgcccactactggaagggaactgggcctcggtggccggggccgcgagctgtgaccacagcaccctcaagcatacggcgctgttcctgccactgtcctgaagatgtgaatgggtggtacgatttcaacactggttaatttcacactccatctccccgctttgtaaatacccatcgggaagagactttttttccatggtgaagagcaataaactctggatgtttgtgcgcgtgtgtggacagtcttatcttccagcatgataggatttgaccattttggtgtaaacatttgtgttttataagatttaccttgtttttatttttctactttgaattgtatacatttggaaagtacccaaataaatgagaagcttctatccttgatttggggaagacattccttagcggaggctgtgcagcctcccgcccctgcatggcccaggcgggacagctgggctcgctcttttctgtccgtttcctgctgtgttttgccctctctggcctgtgacgtgctcctggcgacttcttcctcagtgccctctcttttctgtcctctctgtctcacagcctcgtctcctaagcccctccctcctcctggctcctcttccctgtcctgtctgggccatgtgggggacaggaggctttcctctccctggaccccctggccagcctcgggtgcggggcccgacagcagctcgagggtctccttgctgccgcccttcctgagtgaccaggcacagcacgtgcacgccctggggaacttctacctcttctgccaggccacaggtgagttgggccctctctgtcccctgtgccctgtccatctgtctcctcccacaggtggggggcgggcgggggcatcctccacatccctccacatgttcctttaccttccttatctgtcctggctgcgtccctcgggttgagccgtttcacgctttcattgtgggtccatcccgagggaaactgtagacagtgtgaagccacttctagtgtacaggggtcaaccagtgttttctgtaaagggctagatatttaggccttgtgggctgcaggctgtgtcacagccactaagctctgctgttgtattgtaaaaccagccatagtcaatacacaacgagtggtcagggctgtgtgccagtaaaactttatttataaaaatgcacggtgggccagatttgccccaaaggccccagtttcccaacctgtggtatataggattgcttctcccttaaaaaaaaaaaaaatttcaagagacagggtctccctctgtcaccaaggctggagtgcagtgacacaatcatagctcactgcagcccctgcctcctgggcttaagccatcctcctgcctcagcctccagagccagagtgcttctatttctgctaacaatttggaggttgatatacgtggtatttggaaattttaaaaaattaagagcttccagaatgggagttgttttaatgacttgcttcgtggtatttaaaagcggaaaagattggcgggcataatccccctgctttgggaggccaaggcaggaggattgcttgaagccaggagtttcacagcagcttgagcaacatagcgagacctgatctctacccaaaaatgtgaaaaaaactaaccaggcttggtggcacgtgccttgaggattgtttgagcccaggagtttgaggttacagtaaggtatgatggtgccactgcactccagcctagatcacagaacaagaccctgtctcaaaaatcatcatcattataaaaacagaaaagattgagagactagtgtactcctctgggacctggaggcatttgccctggattggaaaatactcggatgggatatctgctcttgaaagatagtagatgtccagaaccacacttcaaagatgtatcctgtgcttcaggcagtgcgtggtagccctggtggcccctgtgttgtcatctgactgatcagtagatacagaaagaaaggaagtggcctgttagagcctgccccgggggagggatgaagttaatgaagaggaaaagcaaacccaattgctctctttttaaacatgttaaacacactgtcagtagctcctgagagttttaaggtgctgccctctcctgttaaacaagctctgagagccccaggtggcccatgtctgctgaggccagaatgtcccttggcagccagnnnnnnnnnnnnnnnnnnnnnnnnnnnnnnnnnnnnnnnnnnnnnnnnnnnnnnnnnnnnnnnnnnnnnnnnnnnnnnnnnnnncagccagcactggacaggagaagctgccggtgagcatggagcactgtggagacggagctttgctaggctggcttgtgtggttcctgccctccactgggtgctacggaccaagggctgtgctgagccccctgtggccgctctcacagctgaatggtgctcctcggccagctagtttgccttggtgcaggcatcccagaggacttcatgtctccatggagactgtgtcctgtcgcagcactggggtccttcaggcagactcaggaagctcctcctcggtggggaggctgggaagcgggcgggtctctatgaactggccgtggacccagggctcctttgcgggcagatgcaggcaggctgtatggtcaggcaatgttggttggttatttatttatttatttttgaggcagagtcttgctctgttgcccaggctggagtgcagtggcacgatcttggctcactgcaagcttcgcctcccaggatcaagcgatcctcctgcatcagcccccctagtagctgggattacaggcacacctcaccatgcccagctaatttttgtatttttagtagagacagggtttcgccatcttggccaggctggtctcaaactactgacctcaggggatccacctgccttggcctcccaaagtgctgggattacaggcatgagccaccatgcccggctgctgttacatttttaaatgtgaggctccaggtgtaccccctgtagctaggcaggcatacacacaagcccctggggtcagcagggaatgaaagatgggtgcccagggagaagggacatcactgttacagcaacagaaaccaccccagatatttcaaccacagggcatttaacacagggaattggttacaaaggtgatagaagggctgggaacagtgggaaggtgaggtttccattatcagccatgggcaggaagagtgaagtgtcaaacactcagtctcacttgctgtgccaccgaggctgtggccgtgtgatctgcagcctctccctgcccgccacactgccttcactgctggaggtcctacttgaagccacaaaaatgtttcttccttccaacttcctgtctcctgtcaatgactcccatggccagacctaacagaaagctggcggtcacagatggatatggggaatgtagctgtgggcttgcagcagtgtggccaggagtagtgtgtagagggtaggggagctgagggaggagggcagtcctttgccagtgctcaggatggactgaacagattgagaactgaggcccccagccctccgccacccccttttcacgtggtctttactttctctccagaggcatttggccccatctgggacattctcgttcacttgttccactgaggccacagcctgcgaaggctgtgagacctccccagggagcaccagcttaggagagagtggcttcagccttttcaagggtgggccgaggccagggcatcatgggcatgccgtgaactcagaggggctgtggctgtgaatttcccgagtaggctccagggttctgttggggtctgtagatgcttcctgcgacagaggccacagtgtgacttgcaagtcccagagactttcctgaggagagtgagtgccattttctgccttgtgggccaggaatgagccattccaggtgaggcccagagcctggagattgcaatacagtgcactcaaggcacaggcctaccgcttctgcctgtgtcctcccccagccacccagggcagggctgctttggaacttggctgggtttttctttgctataatggctgttttcgtggtagctgtcacagtggtttgggggctgtctgattaaagggctagcaaagtgtctttagaatatgaaacttaagaggacattcgtggcatcttcagttccccatgctgcgtcctggtgcctgtagctctgctgggtgaccctgtgtcttggggagcgtctcaccccccagagagggctgactgatggaaggtcagctggtcagggttgcacttggggactgggtctgccccagagctggtggaggcccatgtgtcacccaggagatgtccccacctgccccaacacttggccagtgctcagaaagtggccccagggacttggccatccaggagaggtgagggccctctgaggccaaagcgcttcctgaaaggggatcggggtgggtctgcacaggggaaaacatagcctgtggtgtgtgcagaggctgccagggcacaagggcccaacgtggggtgcggtggaggtgatgtggccacgtgggcggagtagggcggagaggcctgtgtcctggggatgcgagagcttgaggcctggtggtggggtggaggcccacccttgtcctgcacccaggggcctcagtgcccatccaagggagggacagggccacacctgtgggcctgtgtcaggagctggggtgggagattggccaccagtgccactctccacctagacacatttcatcccttctccaccacagttctcgcctctaggaagtggaattatcagtggaagatgatacggaaagatccactgatggccctggcacaggccagccttgtccctggggcaggatgggacggtcctgagaaggccctgggacaccctaggggtgtcatagtgggaactatgcctttgcagtgcccaggtgagacagcacatggtgtcaccccaagcatggtaccctgggctcagtgacaagaggggtgggcaggtcaggactgcactgccttggggcccgtgccctgggagccgctagccctatgatgcctgagtacctgggggactgagtgcatcggcagggcctggagcagtgggagtggccgannnnnnnnnnnnnnnnnnnnnnnnnnnnnnnnnnnnnnnnnnnnnnnnnnnnnnnnnnnnnnnnnnnnnnnnnnnnnnnnnnnnnnnnnnnnnnnnnnnnnnnnnnnnnnnnnnnnnnnnnnnnnnnnnnnnnnnnnnnnnnnnnnnnnnnnnnnnnnnnnnnnnnnnnnnnnnnnnnnnnnnnnnnnnnnnnnnnnnnnnnnnnnnnnnnnnnnnnnnnnnnnnnnnnnnnnnnnnnnnnnnnnnnnnnnnnnnnnnnnnnnnnnnnnnnnnnnnnnnnnnnnnnnnnnnnnnnnnnnnnnnnnnnnnnnnnnnnnnnnnnnnnnnnnnnnnnnnnnnnnnnnnnnnnnnnnnnnnnnnnnnnnnnnnnnnnnnnnnnnnnnnnnnnnnnnnnnnnnnnnnnnnnnnnnnnnnnnnnnnnnnnnnnnnnnnnnnnnnnnnnnnnnnnnnnnnnnnnnnnnnnnnnnnnnnnnnnnnnnnnnnnnnnnnnnnnnnnnnnnnnnnnnnnnnnnnnnnnnnnnnnnnnnnnnnnnnnnnnnnnnnnnnnnnnnnnnnnnnnnnnnnnnnnnnnnnnnnnnnnnnnnnnnnnnnnnnnnnnnnnnnnnnnnnaccaaacacaaccactcacacatgcaccacacacagcacagcatacaacacacatcacacacacaccaatcataccactgttacacacacaccaccacacatactgcacacaccaaagcacatacacaccacatagacacatgcacgctacccacaccacaccaatcacatccacacatacacaaccatacacacacacacacacattgttgacttaggatcgtttcaactcacagtgggtttattgggatgcagccccgtggcaagtggagcagcatgtgtattgacaaggggaggaaagccgtctggagctggtgaagtaaagttagcatgcagccgagctctgctcgtctgaactgatgaacccaagttcctcatggatcactcagaatacagatgggtgaaaaaataaccccaccacccgtgtgccagcacatagcgcatctggcatacaaacgtaaggatcaatagcgatgaatggcgatgggttgtgtctacatgcagatacaaatcatgcacttgtacattagtgtgcacacacagaaacagatcgatataattttttaaccaaagtgcagtctttaccctgtcagggccctgccttcacctctgccaggactatcttccatgtcaagtttagacccgtgtcattttcaaagctaataatggttcccccatactttaggcagcatttagatatttggatttgggatggccttttatgttttaactacagtgttagaaatcagagcccttggaaccactgggatcagagggcagcagcagaaggcgcccttggtcctctttgaggggcccagggctccggagagggcccccgttcctagcagccacagtggcctgttggcacgcatgtgtgtgttccagctgctctgtgacatttccctttgtttcagactcttgaaaggccacggccgtcgtgggaattagttgaccttgtgtgttgggccacccttgctggacaggacaaggtggtgctatcaactccctgtgctctgaggtccttcgcatgttagatgaggcagcttcaccagaaactatccatgtctcttctgttatctgggataattccacgtgcctttacaacacagctgtctggttacctggggtctggaaatgccctcggtgcctcagtggtgccttcccacaggccccccatgggagccaggcgatgcctacagatgcctcagtggtactttctcaggtccctttgcagagaagaggttcaggattcctgcccacattgataaggcggcttggccagtaagtggcaggcatgaacaggtgcattccagaagcgctggggctggtccagtgccctgagtggtctagagcataccagagtgaaacgttaggctgcgtcggcctggtgactgtcagggagatgaggactcagagaagggagctgtcagaattgctacctatgtggcaggggtctcactctctcctccctcctcttggggcccctggctactctgtgacttcaacagaggacagaaaggatgaccaacaaggcctcagggcatacccccagctgcactgtccttgtccccagaagggtccccagagtctgggagggaggaggggccatggccaggattagaaaagaccgtgccccaaggagagagcacagagatgggccagggaagcagtgggatcctcgggaaaagaggctgggagcaggtgtccgggtgaggcccgggcagcgggtacaggcagggacaagccaggagtcccatcatggaagacatgatggccagcggccagcactgtgtgcagagaatggcccctctggggatgtgcccgctgccccattagttgcaggaaggccacctggatgtgagtttgggagatgggctggccccgaggcagccagccctgaggtcagagtgggccacatgcatggggatgccgggaggacacagaggagtgctgcaggagatggcagtgggggcactttccaggatgggcccgagcaactcagtcactgggtggatgtctcaccacccctccaggccttcctcagggcgaggccactgcccagagggcacctggtttgtcgcagagtagaatcagctccatattttgtaatcacatccacgaagctctgaagccatggtggtcctggcaccagctggctccgttagaggcttggggtgggagtgagcaggtgggaggtgccccagtgacaggctgagtgctggagcccaggctgccaacagcctccccagactcctgagttgatgtaataaacccagccctggtgaataaacctggcccttgcttataccaaggtgatcagtcttctcacgacagtcctagctgtaggagaaagatcattacctacggcatctgccacagcagttaatttgccttcaacttaagctagttgcagtgacaggaagggccagggggaaatatctgtcctcaggacctctaccctagatccttgtaagccacaacaacttcccttctttgagggcgcgaccagtgtcacctggctcgccactgggaagagccaaggcacatccaggttggtggctgctgagccccacagcatcagaccagcctcttgtccccaccccacagaggccaagggggtgatctgggagtagcaccccagcctggccgctctcttgaggtaacagggttggatggttagggagcttggagcactggcccaagcaagaaaccagtggtgttttcaggaggccctgctgggagatggaagacagctccccactgggggcctaggattccaggagctccccagcagtcctccgtgggacatacgtgggtttgcacctgctgccctgtcccgctgagggtgcggtgctgatggggtggccctgcacactgatggtaactctcactttccctctctctcatgcattcagaaagagatggatagtttaaaaacgaatacatggaacgtaagtacttctttaacatctttaatgtcttatgatgatcaagcatgtatttaaatagtatttactgatgcctgttagcagtggtaagcacgtgtctgtttctgctcacaccccaagagtgtagagctttgagggttttgcagtcagtggtcccatgatggggcgttgggtgattaatccaatccagcttaggccacccagattcttagtctcaagggcttggtcatgagaaccttccagaggctcctgtgactcagtgactccagtcccctgggtggttcttggtgcaggtcacatgagggaggagaccgggcttttatagaactcacttcactgtctgttcaaagaaaagtgttacttgatcataacagctcaaaaaaatctgtttcttaaaatgagattttacctggatgcccatcagctgggaaagggaatatctattccccagttgatgggcacctagatgtacatagagacatatgtttgtacatctatgtaatatgtacttatatttgtagatagatacatggaattatctgtggccagagtccaaaacattttgagtgggaaaaaacaaattatagagtgttaagttttgtttttttttaaattctgcacaaaaaccaaacctgttcacaagggcttgtccaccaggccagggccagatgggccgccaggcaaaacagttttggagcaccttctgaatttccttgagtttacagaatgtttccttcaaagtaacacttttataaaaaattattattataaaagcaatgcttgtttgttataagtttggaaactccagggaagtataaagaaaaaatttaaacaatcccaaatttaaccatccagaggtagttaccaccagcatcccggccatttttgggccatgactatctacgttcacacatgtatacatgggtgtgtacatatatgcacacattcctagatattgtttcacttatttttctgtgttgctgaatattcttcgatggcacttcgaatgagtgacttgtggccccctccttggacatttcccaactcctcactgatagaaacagggcttcactgggcccatccttgcctcgggactcattcctaggactgcccagctaaagggtctgagcttggtcaagtccttgggaggagcattctctggtgatcctggacagtggggaattgttgaccaagagaccggacaaagatgagcagatgccacagtcagtaaagcagggaaaatgcattactaaagtcagcttcattaaactggcgatcgcttcttttcaaaagtccagcatgtgccacagaaatggaaagctctctggccactactgtcctgcccagggaggggagcgtgggtccacccacaccatttaatacctgtaactggatgcacctctgcccctacacctgagaacaaggccagtttttgtgtgtgcaggtactttggactcttttggctctggaatttgttttacctgctcagtgttctgaactccttccttttcactactaagcattctccatgaagccacacttcattttgtcattgtgagggtgatgggcatctagggcaaatctaannnnnnnnnnnnnnnnnnnnnnnnnnnnnnnnnnnnnnnnnnnnnnnnnnnnnnnnnnnnnnnnnnnnnnnnnnnnnnnnnnnnnnnnnnnnnnnnnnnnnnnnnnnnnnnnnnnnnnnnnnnnnnnnnnnnnnnnnnnnnnnnnnnnnnnnnnnnnnnnnnnnnnnnnnnnnnnnnnnnnnnnnnnnnnnnggtcgctaggcagcaggtgggtgtcaccccagtccacgctgctggggtgcctggcctgatgcaggctgtgcctgagggagacagaagcagcagagtaggctggccggcctccccagccccaccacaagcaggagcttcagagacagaaggagcacctgcaccccctcacctgccctccagggcctggcctggccctcccagctcaactccagggtctgtacgctctggggctggagcttagtgggagtgtggcccccctcagccctttctgcatttgagtggaagccagtgtgcgaagcagatcaaaatggatgtgcttgtttttccttcagtaagaacagggagttgagcctgtcccaacatggccagcagcccctggagggccaacagacttcacgagcaaggaaggccgggaggtgacctgctgaccagaacttacttgtgcccctcccccccgcccaaaacccccaacattctggttttcacagccccaccccagccacctggaacaaatagtgtctaggagtagccctcagggttggccgcgcagacttcttgccctgggatgaggctggcctccccaggcgaggcagcctgggccacaggggaacgtctctgcctcgcccaccctcctgatctctccatcagacaagctgaggccagccaggctccaccctggcaggttgcaacagatggtctgagtgtgtgtgaagtaactggcctctctactttcttcaataagtaattaagatcaaaagcccagagaaaaacaacagaggtttgcggcagaagtggccaatgtcgggcccagagtccatgctcaaggctggaagcccatcctggatgtgctgcactcggcagtcctagtgtaattctgcagggcccggcccctgccagggtctgagctctccagcctgtggcatctactcccctccaagcccaccccagtgtctcaattggagagacaggccctcatggtccccactctggcccagccccctctgcacacagctggccgagctctgggcctctccatgctgtggccctggtgatggcagagccttgggatgtctctgtccatgtggtcacaggacatgtgtgtggcagcagggccatggtggggtgggatgctgttccaaggcccagaaccattctgtaagaaaccagcacagcgctgcaagaaagggggtcctaggggacacaggccacacaggtgtgctttgaaaaatggcaattaaggtcaaagagcaggaagtccacaggacgggccaaggccaaggctcccgctggccatggggaagccacctccagggcagtcccagggactgaattggaagttgtcccaagtcacttcaggtccaactgggacagcagaggtaacccccctgcaccctcatggggcagcttctttgggtcctaaatgtggactcagaggtggaaacggtctgtgtccccaggtcctgcagacattcgctttgtctgggagaagaatgggcgagctctggagacctgtgtccctgtgcagacccatgcactgcccgatggcagggcccatgcactcagctggctgcaggacgccatcagggaaagcgctgagtatcgctgctctgtcctctcctcagcagggaacaagacttcgaaggtgcaggttgctgtgatgagacctggtaagtgattcccatgcccactgttacccttttatgaggtaatttttcactatttacaatggcagtgaaaaaaacagctggaaagcatgcttgcacggtggcattctgggtttgggatttattggctttccattgagaaaggtggccagtgggcatcaagggtgccataaaggcccacagagctttgacctggggaccctgcttgttttccagaagtgacccaccaggagaggtggaccagagagctctctgcctggaaggctgtggctggggagcacgaccggatgatgcagagctggaggaaggcgtgggtaagtggccgcagccgggcaaagaaaggagggctggagccaggggcagggcacctgccacatccagtggatctttcaagggccccattcagcatggaccccacttgttccctcttagccccggagcagtttcctttatgaaatctgcaacactgggggggggaaatcccacgtcttgttgctgaggctgcaggagatcaaggggcatctggccccagcccttaaaagagactgaagggaggcgagactgggagggactcacaggtggggctgtctagttagatgggcccccacgaccaccccattctctgtacagagcactcagccagccactcctttgaggagggcaggaaacctggacagatggggaaccctccaggtagctcctggctggatgcctcacctgaggcacctgttggaggggtcagggggagtggcttcctgagctaagccctggcaggaactgggctacagcatggaagctgcaggcagtggggcagaggctccctagaggctccctgtctccccacggagacaaagttgtccagccccggctcctaaatagccgatacagaaggcaaaggcagggattcatcactgtgtgctaccacctgcggtggggtctgcagcactcaaatgagtgcattaaagtgtgtgggttacgtggctgccagcagtacacccccgaactgttgccaccaaaggctgggcatttacagctgatcctctgtacttcagcacacacaggctccctctctccagccctcctgcctctcagcacaatctgggagtggagtgaatgcgctgctgctctgccttcctgtcacatatgggagaaccactcctggcatttggatctttagactccaaggaggggaaccacaacagggggctgaggccttgagtgctctgcctgggatgggctatgagacagactgggctgcagagcaggaaaggcccatccgttccaccaaggattcaaagaccacattgttctttcaggaaagctgtagcaaggacaccctgtagccaccaggaaggagtccctgacaccgacctcaaccccaacaagaccctgctgccactgaccacagccacccccggagaaggcctggtcccccacaactgtgaactgtcttgcccaagcctgctctgaacacagccattgggccaccacctgatgggcagaggcgggacagtggagaagcctggaacccaagtgggcctgtgacaggaactaagacttaaaaaattaggtgcttacctgggacagtaagttctgtctggcacaagcaggtaaccaggatggctaacaggctttgatagctgctcgtgaactaaaacagcagggtgtgtgcaggttcctcctctacggtcaggcagcaggctctgaaggctgatcctacaccgtcccagtgactccccttgacagagtgcccccaccccctaatagccaacagggttagcatggccagcacagatcgctgcttttattgatgcaaatcaagcctgctgcttctcctccctgcagacttagccaaggaactccaagatgcatgactgggacaagaaaaggtgagactccacatggaaatgccttgccctaaaccttgaatgactgtgagatgcgatctgggagtgcatctgtcaagtctttgtgttttcttcactaacctcagaatactgggctctattttatcaagcgctgcagtttatgcctctgtcccgtcaatgctcagcttctgcaacaggacaccaaacttgatgcagaaagccaaataggtcaattatgcaaatctcctggtgccatattaaatttcttgacgatggaatgagtctcatgagtgttttgttctacctgctttcaagtctctaattattaaagctgtatctctgaagactgtgtcactgtgtgtgtgaacttgtcctaaagctactcagcctttaatcttacacacacgtctcttcttgtctgttgaatgacagttttcatgtctatcataaaaccaaagcctctgttaaaagtcaagctgcacccctctggtgatcctagcaaatactgagtgtcttcccagcagtgtgacaatgacctgttttgcatcccctctttctggagctggacaaattctctaccagcctttgtgtgggatcagcatacatcgcctgctaattccttcaggatccatcacaacaggtgtcctgaagatgctggagacaccctggttgtctccacacgttccccctccgcaccccaagtcgagaggcccagctgcctgtgaggtgtgtgcttgcccatccagccaaggatgccagtcttgctcacggaaccatcacatactcataacctgaagttttcctgtaaaatatccatcagctcactgtggttcttgctttgggtgtggcttcaaccactacaaactgatgagtgaaatgctatgggctttaggcttatattcttggtgctgttttctgtctcttctcctgaagtctggatttcaagcactttcacacttaacaaaataattacatacttgaagttttcgtaatgtggagtgttctactgggaaatggagttatgaggatgaatttctgagtctttctttgctctgctggaaaaaataaaaatagagttgtacattgttcagttaaatgactgtacttggcgcccctggcccagagctgtgtgcttcatgcggnnnnnnnnnnnnnnnnnnnnnnnnnnnnnnnnnnnnnnnnnnnnnnnnnnnnnnnnnnnnnnnnnnnnnnnnnnnnnnnnnnnnnnnnnnnnnnnnnnnnnnnnnnnnnnnnnnnnnnnnnnnnnnnnnnnnnnnnnnnnnnnnnnnnnnnnnnnnnnnnnnnnnnnnnnnnnnnnnnnnnnnnnnnnnnnnnnnnnnnnnnnnnnnnnnnnnnnnnnnnnnnnnnnnnnnnnnnnnnnnnnnnnnnnnnnnnnnnnnnnnnnnnnnnnnnnnnnnnnnnnnnnnnnnnnnnnnnnnnnnnnnnnnnnnnnnnnnnnnnnnnnnnnnnnnnnnnnnnnnnnnnnnnnnnnnnnnnnnnnnnnnnnnnnnnnnnnnnnnnnnnnnnnnnnnnnnnnnnnnnnnnnnnnnnnnnnnnnnnnnnnnnnnnnnnnnnnnnnnnnnnnnnnnnnnnnnnnnnnnnnnnnnnnnnnnnnnnnnnnnnnnnnnnnnnnnnnnnnnnnnnnnnnnnnnnnnnnnnnnnnnnnnnnnnnnnnnnnnnnnnnnnnnnnnnnnnnnnnggactactgatggcctggctgaccacatctacttcccatgtctaaacagctcagaacgtgtaaagaacagcaaggctcacactggtcactgtgagctccacagatgacagggcagacggtgccttcatacaccaacctctggtcacatttccagccctgctcatagcatgtcatttctgactcactattccaattttatgtgctcatcacaggccgcttctcaagaggtacaatattgccaagactgaattcaattaagagcactttcaaagccaaaacaatacaaaaagcagtgaaaattctttcctgccattggctgtggtgaaaacgcaagtgcaggttgggattgagccaggatctggctccggcaggtctgtgcagtgctggaggctttgacaatcactacttccagacctaggagtgctggggatagcagaacccccactacgcggcccccttttatttcagggcccagactgtccaaaggaggtaaattaagacataggaatcatcaagtaagacagagaccactgagaagcctaaaatcaccagagtctgaaacaaaatttaataattactctttatttaaaataaataagccctcttacttacagggaaaatatgaaagcaaactctgtcctcctggtctaagacagaaaccacattcagaatatgttcattgaaaaaggaaagatttgttgattatcaaacaaatctaggtacttcaatacacattgtttctttgaaaaataaagactgaaaggaataattcatttcaaaaagtcacaggttagaaaaccaattttccttctgaggctcattttagcaaatcctccaagtgttcccaaatcttttaaaaaagctacatcccctgagaaagggccctttccctgtagccctcttgctctgacaccagcagccctgcacccttctgccaagtggctccctgcaggacggtgctgttgccgggcaggaatggccctccatggcaacctccagcaggcaggagctcaccacctgctttctgcaaactcactcacttggctcagctattctgcaatggagaggaagtttccttagcagccaaagtattctaagtatcacattttccagtattttccagatccgtagtgtgctcagaaagccagagctgtatcaccaggcttttagagaagattaacacctgcacatctgagtgacctttaacaggctccgcagcactgaacgcctgcagacactgcttcatgtgccctttaatgctgatcaatttccagattcaacagttacacaaattacattgtcatgaaaaacagaagaaaaagccccaaagtctttttcagacctcccctccttacccaaaatacagacacacaggcaagaactctcataaattcaaattcatcatttgagaggttgaagcctccaaggattcttctagctccagggtacatccactgtatgcttccagatgttttttccagatttcaactaaaatgagaaaacagcacgagtgaggaataggcatcaacaagtaggaaaactcctgtaagaaaaccagcagcatgagagagggagcctgtggccactgcccagcagctcacggtgctcagaggtgccctggcagacattcactcactgttctcagcctgctgggccgggctgccccttattgaggagaagctggggggccatcttctatagggcagctggggccttgtgtaggtaggctaggagaggactgaacctttacttggccttccaagcctgtcttgggtacagctatccttaaggccacccattgtcaaaagacatctgacttgaagtctgagacagtcactgacaagcccttcccacttcaaaagtctgataatacctcttaggcaatgggctggacttaccaggccctgctactcagctggtcttgcagcattgtcaagctgctcacctagggactcctaattaaagtcagtaaataagaggacactcgacctgacacaactctcccttaagcactcactgtagtgtggctcttctttttctttcagggctggggggccatcttctgcagggcagctggggccctgtgtgggtaggctgggaggtgcctgaggcctgggctctcccaccagctcctgctgcacattctccagcatggtcttgtacgcctgtcgggccgccactgtcagctcaaccatcttgtggaactgatccttgggcacaagtgagagcacacaggtaacatcccagctacagaggacacgggtccctcaaactcagcaatggccacctccacagagaagcaggggtgacatggggtaatgtggacctcatgcttatgggtgggtaccagggatgctgccccagaggaaagagtgggctaggccgacttcttgggcctgcctgaggtgccactatgtcagcagcaagcccagaacagagctcagttcagaaccagacaacccatgatgtcaaggagacaaaggctacttttttataagaaggttctgcctaagtggtggctcctcctcaatgacagcctactggaggttctggggctgctctgtgggtgagcccacactgaccacctgcccccacttcctcccacgggcagtgactgaagaggcctgtgccctgtgcactcacctgggccccatcatagctgaagatccccaccacactgacaggaactgccttattcaaactgcgccccagagctttgcggttgagagcaaacacaaagggaatgttctgctcacaggcataatcaataattgtgtgcaaagtgtcatccagcccacctggtcaaaggacaatgaaaaatgacaggaagacatgtcacatggagtgtggtgttaatactggttgcaaagagctttttcttagcaacacacccatctatgattttatatccaaggcagacgcccctgaaaatacaaggagaaagcaagttgcagaatcaactctccaaaaatatggggaaaaatggaaagaaaacacacagctggtattgtcttaacaggaaaagttaactattagtattactgaaacttaccacctattagctcctgtgtcctcccccaaatcccaaaaggcagacagatgctgtgtcctcactgacagatgcacaaccagaggcacagaaaggttaagtttcttatcccacattgtacccctggtcgaggcacaggtctggctcccgagggctcaccaccctctactccctgaccctgcttctgggccagggaccagccaaggctggtgcaccagagagaggatggaggtgaaatgagtaccatgtgcaggtgatgcacctggaaaacccaacagcacctgagaagtactcctaacagcatgagaaatacatgagggggtgtggcacaagcacacagcagccagttggcatatatcaaagagatgactccatttacaacagcagcacaagactatagttggtaggaatgaatttttcaagaaacatgaaaagatttacaggcaacttcagcatgctgttaaagaacgcaataccagcctacgcaacatagtaagatcccgtctctacaaaaaaaaaaaagaagaaaaaaaatttgcccagtgtggtggtatgtgcctgtagtcaatctactcaggaagcggaggcaagctcagtaacttgagcccaggagttcaaggctgcaatgagccatgatcatgccactgcactccagcctgggcaacagagtgagaccctgtcttttaaaccatccccgcaacagaaaatctgaacaaatgaaaaggcacctatgctcctgcatagaatgatccaaaatgatgaaatgtcaactccacattaatctaacactttaaaacagcggtccccaatctttttggcaccagggactggtttcgtggaagacaatttttccacggacaggggaagatggttttgggatgaaactgttccacctcagatcatcaggcattagttagattctcataaggagcaggcaacctagatccctcacaagcgcagtttacaacagagtttgtgctcctatgcgaatccaacgctgctgctgttctgacagaaggcagagctcaggcagtaatgctcacctcctgctgtgccacccagttcctaacaggccccagataatactggtctgcagcccaggggttggggacgcctgctttaaaatactgtaagttactacagacgggatttcactaagaaataaaaaatatggaaaaaatataaaaagatgtcaggctaacatggtcaggtattaaagtttactataaagataccatagtgtaaacaaggtgatgcagattaacaggatggacgccagaaaaaaccggagtttgatggaaacagcatgtgaggaacagcattttggtttagttagggagaagatcctagaggactgggtgggcccatcctgtccatcttagaccacaataaatcctacctaaacatatacaaatgaaggaaccaggagatatacagaattttaaaagcaaaccttttaaacgctggagtgggaaggctgagaaataacacaatacctagatgcaactaaaaaatgaaataccaatatataaaacacctaaagtctctgcatggccaatttttttttttggtggagaaactgacaaaccagaagaaacacttggaactcttacccaaagggctaacttataaaaaaggtacaaatcaatctaaaagaggtcaacatcccaaaagcaaatgggcaacaaatatgaacaattcacagaaaatgccaagctcctgatgctgaccctccctcataagaaaactgctaataaaaactcctggagaggatgctcacaccaccctgggagggaacacagtggtctctggaggaaggcacagcatatgctttcgagttaccaaggcacacagcattgtaggccaggcatctggcctacaggatactcacccagtctttacggagcaactgtaaaaaacaacaactgtttacaattagcatagtatcacctggaatctacttacatatcgatcctctcatttcaagagaagaacttctccaatgcacgtcctaccatactgtggaaactgggaactcattctgcatctagttggataggagattaatttctaaacccacagcccttattctgcccacaccctgcccctgatctacccaaagcatttgcaaagtgatgaggaggcagcctcctgggatagaaactttgaagaaaaagaccagttccagatgggctgggaaaaggggagatagggcagaggtggggtggagtgttccgtattcctgaggtatacttacagtgaaatctatattcagtttgtcaggggagacatatgaagtcccccgtaacatcagatgcatctctctcactggagggtctctgcctggtgtccaccccagctcccgggagtgaatctgaaatgttatttgagcactgtgcagaaacaacctaacagagcaggcttggctgctgtcctctcgaggctgcctgtcaggttggcccttggttggggtctgtgaacttggattttgggagggttcccaccaccttaactggtaagagtaactcactgtgcctctatggtgtgcaaacactgtggtttctgctgaacacctgctttccttctggagtctggaactttgtgtgtgctaggcagaggatgcctgcgtgaccggcccccaacagaaccctaggcgctgagtctctaatgagcacccctggtagacaacacttcccacgggctcttaacttgtctctgggatattaagagtctcctatgtgatgtcactaaaagtgacttttggaagctggagcctggtttcccccacatttaaccccatgtgcctcttcgctttgctaattttgctttgtgccttttcactgtagtaagtcacagctgaaagtaccactctaagctgagtcatgtgagtcctcctggcacatcactgagcctggtggtggccttgggaacacccaatacaagcagcaaaatccagactgttttgctcaaacaacctccaacccgttattagtgagatgaaagcacgtgtggcaagggccaactactgaagttccacaagaaagcttatgtcaaacaagcaagatgctaggctcagattatttccatttcaaagtttaagttcagaattattaggttaaatgccactcagagcaaatacagtacttcaacttaattcaaggctataacatcaatttttatctttaagatgactgcaagccattggctatcttatctggcaaatatttataaaatatacaatcaagtcccttatgcctcaaagcaaaaacgtgtcggaaccaatgattacacaaatgcattttaagtatacaacaaatccttatgatgctgatcaagtaaaaacctagccccatgctctggcagaggcagagaaggagaatgatgtcttccaagaaagtggggtgactgcaggctaagggcatacatttccacctttttgttttttaaagacacaaatccacggaagaatgtgagagacaacagcaaaaagtttcagaagctgacatgcaaatggacaactgagctagccaacctaagccaacagtgagaaaagcctagaacagccagccctggaccccagaatcccccaaaggtcgggaataggcagcacagggtgaggcacaggtgaagagggctggttgaacactgggcaaagaggcaactcggtgtccagcccctcagctgcagccctctggtgaggcacagcacaggtttgcaggacatgacgcaccacacatctaatggtggtgagaggatgagctcacagggtgaagttcgcctgtccctccaggcaggcagtgagaagtcttccttggggatgtgaccagccctaggggagacagagacacccaggggcacttccaacatggaagcagcccaaccacatcatcctacagcagaagttctcagtgcactccttggagaagcagcaacagcacctgggaacttgctggaagtacaaattcttgggcccactggacctacttgaagcagaaactctggaatctgtgttttccccagccctctgggtgattctgatgctggctacagttttgagaatcaccaccctcaacgctgctcacagccttgaacagcagccacacacccggatttccagtcggctacttagtggctcttaagtaggcgcagacaactaggacacagaggacatctgtggaaaacctccaccatgagaggccaaaacaaacagagcaaactacctggaggaaacagaggcactgcagggagaggaactaggcatcattaaaattctccaagaggcaaccatgaggcagcagcaacgtgattaaaaaaaaaaaaggaatcttcagaggacaaaaacagctcccaaaaaataaaaataatatcagaagtaaaaaattatacagaaattttacaagatatggttgagaaattctaacagaaaatgaaaccaaaagaaagagataaaaagaagcaggaaacaaataatgtgaggacaccagtccaggaggcccgaccctgacatacttccaagagctggcagggactggagaagaggattcaaagcaaaaattcatcgtgtcccagagccaaagacactggatgcaaactgtcccacatcctgtaaccccaggatcaaggcacttccagtgaacccccagagagcacgaggtgcaaaatgatcacaaaggatcaagaatcagagtctctggatttcaagcaagaccttcaaaatatgcctcccatgaatccttttctcctaaaccactggaggatgcactccaacaaaacaagagtgcagcccaagaagaagtccataaacaacaccttattgagagcagggtgggagccaagggtatccctgggtggcaaatgcatgaggtgcagtgagctgggaatgaaggtttcttcagcagatgaaactgcagaatgcctggtgtaaccgtcttagaggagactgaggcagctggctgagggcatgaggtttcattaatgctaagtatatagacaattaagcaaccaccacaaaacaagaacaataacccaaactatacattaggggaagtaacagcaaagcccttttgctctattgggaagatgacaaatacttaaaactgaaaacatgtgaagcagttgctcacaagcctcttacatggagatatggaggaaatatcccacagtgtggctaacagctgacaggtggagttgctaggaaaggaagggagcccaagcctgcccctcccttaacaaaccctataggactacttgaccctttagctgtggacatgtacaacactgacaaaaacagccagggaagcatgtggcctgtcctctccaatgacctggaaaggcctctgggcacacaatcagatgagtgggtcactgagatcccttctgtcatattctggtcagcggtgatgctggacccgtaccaagttaggacagggacgagctgctggctgggggcctcggacatgtcacaaaacttccaggctttagatatgaaatggtaactgggaaacatcatctttgagggttcagcccca

SEQ ID NO: 81 - DNA, 4568 bp, Homo sapiens
catttcttctgaggccctgaagaagtatcaagtgggctttgacattgcggtggtgagagcgacccctcctcacctggagaactgggaaatgtggattctcagggaccgcgctgttcacgagctccaggctgtgctgctggccctggtcctggggcgctgagccgcatctgcaatagcacacttgcccggccacctgctgccgtgagcctttgctgctgaagcccctggggtcgcctctacctgatgaggatgtgcacccccattagggggctgctcatggcccttgcagtgatgtttgggacagcgatggcatttgcacccataccccggatcacctgggagcacagagaggtgcacctggtgcagtttcatgagccagacatctacaactactcagccttgctgctgagcgaggacaaggacaccttgtacataggtgcccgggaggcggtcttcactgtgaacgcactcaacatctccgagaagcagcatgaggtgtattggaaggtctcagaagacaaaaaagcaaaatgtgcagaaaaggggaaatcaaaacagacagagtgcctcaactacatccgggtgctgcagccactcagcgccacttccctttacgtgtgtgggaccaacgcattccagccggcctgtgaccacctgaacttaacatcctttaagtttctggggaaaaatgaagatggcaaaggaagatgtccctttgacccagcacacagctacacatccgtcatggttgatggagaactttattcggggacgtcgtataattttttgggaagtgaacccatcatctcccgaaattcttcccacagtcctctgaggacagaatatgcaatcccttggctgaacgagcctagtttcgtgtttgctgacgtgatccgaaaaagcccagacagccccgacggcgaggatgacagggtctacttcttcttcacggaggtgtctgtggagtatgagtttgtgttcagggtgctgatcccacggatagcaagagtgtgcaagggggaccagggcggcctgaggaccttgcagaagaaatggacctccttcctgaaagcccgactcatctgctcccggccagacagcggcttggtcttcaatgtgctgcgggatgtcttcgtgctcaggtccccgggcctgaaggtgcctgtgttctatgcactcttcaccccacagctgaacaacgtggggctgtcggcagtgtgcgcctacaacctgtccacagccgaggaggtcttctcccacgggaagtacatgcagagcaccacagtggagcagtcccacaccaagtgggtgcgctataatggcccggtacccaagccgcggcctggagcgtgcatcgacagcgaggcacgggccgccaactacaccagctccttgaatttgccagacaagacgctgcagttcgttaaagaccaccctttgatggatgactcggtaaccccaatagacaacaggcccaggttaatcaagaaagatgtgaactacacccagatcgtggtggaccggacccaggccctggatgggactgtctatgatgtcatgtttgtcagcacagaccggggagctctgcacaaagccatcagcctcgagcacgctgttcacatcatcgaggagacccagctcttccaggactttgagccagtccagaccctgctgctgtcttcaaagaagggcaacaggtttgtctatgctggctctaactcgggcgtggtccaggccccgctggccttctgtgggaagcacggcacctgcgaggactgtgtgctggcgcgggacccctactgcgcctggagcccgcccacagcgacctgcgtggctctgcaccagaccgagagccccagcaggggtttgattcaggagatgagcggcgatgcttctgtgtgcccggataaaagtaaaggaagttaccggcagcattttttcaagcacggtggcacagcggaactgaaatgctcccaaaaatccaacctggcccgggtcttttggaagttccagaatggcgtgttgaaggccgagagccccaagtacggtcttatgggcagaaaaaacttgctcatcttcaacttgtcagaaggagacagtggggtgtaccagtgcctgtcagaggagagggttaagaacaaaacggtcttccaagtggtcgccaagcacgtcctggaagtgaaggtggttccaaagcccgtagtggcccccaccttgtcagttgttcagacagaaggtagtaggattgccaccaaagtgttggtggcatccacccaagggtcttctcccccaaccccagccgtgcaggccacctcctccggggccatcacccttcctcccaagcctgcgcccaccggcacatcctgcgaaccaaagatcgtcatcaacacggtcccccagctccactcggagaaaaccatgtatcttaagtccagcgacaaccgcctcctcatgtccctcttcctcttcttctttgttctcttcctctgcctctttttctacaactgctataagggatacctgcccagacagtgcttgaaattccgctcggccctactaattgggaagaagaagcccaagtcagatttctgtgaccgtgagcagagcctgaaggagacgttagtagagccagggagcttctcccagcagaatggggagcaccccaagccagccctggacaccggctatgagaccgagcaagacaccatcaccagcaaagtccccacggatagggaggactcacagaggatcgacgacctttctgccaggacaagccctttgacgtcaagtgtgagctgaagttcgctgactcagacgcagatggagactgaggccggctgtgcatccccgctggtgcctcggctgcgacgtgtccaggcgtggagagttttgtgtttctcctgttcagtatccgagtctcgtgcagtgctgcgtaggttagcccgcatcgtgcagacaacctcagtcctcttgtctattttctcttgggttgagcctgtgacttggtttctctttgtccttttggaaaaatgacaagcattgcatcccagtcttgtgttccgaagtcagtcggagtacttgaagaaggcccacgggcggcacggagttcctgagccctttctgtagtgggggaaaggtggctggacctctgttggctgagaagagcatcccttcagcttcccctccccgtagcagccactaaaagattatttaattccagattggaaatgacattttagtttatcagattggtaacttatcgcctgttgtccagattggcacgaaccttttcttccacttaattatttttttaggattttgctttgattgtgtttatgtcatgggtcatttttttttagttacagaagcagttgtgttaatatttagaagaagatgtatatcttccagattttgttatatatttggcataaaatacggcttacgttgcttaagattctcagggataaacttccttttgctaaatgcattctttctgcttttagaaatgtagacataaacactccccggagcccactcaccttttttctttttctttttttttttttaactttattccttgagggaagcattgtttttggagagattttctttctgtacttcgttttacttttctttttttttaacttttactctctcgaagaagaggaccttcccacatccacgaggtgggttttgagcaagggaaggtagcctggatgagctgagtggagccaggctggcccagagctgagatgggagtgcggtacaatctggagcccacagctgtcggtcagaacctcctgtgagacagatggaaccttcacaagggcgcctttggttctctgaacatctcctttctcttcttgcttcaattgcatacccactgcctgcccagactttctatccagcctcactgagctgcccactactggaagggaactgggcctcggtggccggggccgcgagctgtgaccacagcaccctcaagcatacggcgctgttcctgccactgtcctgaagatgtgaatgggtggtacgatttcaacactggttaatttcacactccatctccccgctttgtaaatacccatcgggaagagactttttttccatggtgaagagcaataaactctggatgtttgtgcgcgtgtgtggacagtcttatcttccagcatgataggatttgaccattttggtgtaaacatttgtgttttataagatttaccttgtttttatttttctactttgaattgtatacatttggaaagtacccaaataaatgagaagcttctatccttgatttggggaagacattccttagcggaggctgtgcagcctcccgcccctgcatggcccaggcgggacagctgggctcgctcttttctgtccgtttcctgctgtgttttgccctctctggcctgtgacgtgctcctggcgacttcttcctcagtgccctctcttttctgtcctctctgtctcacagcctcgtctcctaagcccctccctcctcctggctcctcttccctgtcctgtctgggccatgtgggggacaggaggctttcctctcc

SEQ ID NO: 82 - protein, 845 aa, Homo sapiens
MRMCTPIRGLLMAVMFGTAMAFAPIPRITWEHREVHLVQFHEPDIYNYSALLLSEDKDTLYIGAREAVFTVNALNISEKQHEVYWKVSEDKKAKCAEKGKSKQTECLNYIRVLQPLSATSLYVCGTNAFQPACDHLNLTSFKFLGKNEDGKGRCPFDPAHSYTSVMVDGEKGTSYNFLGSEPIISRNSSHSPLRTEYAIPWLNEPSFVFADVIRKSPDSPDGEDDRVYFFFTEVSVEYEFVFRVLIPRIARVCKGDQGGLRTLQKKWTSFLKARLICSRPDSGLVFNVLRDVFVLRSPGLKVPVFYALFTPQLNNVGLSAVCAYNLSTAEEVFSHGKYMQSTTVEQSHTKWVRYNGPVPKPRPGACIDSEARAANYTSSLNLPDKTLQFVKDHPLMDDSVTPIDNRPRLIKKDVNYTQIVVDRTQALDGTVYDVMFVSTDRGALHKAISLEHAVHIIEETQLFQDFEPVQTLLLSSKKGNRFVYAGSNSGVVQAPLAFCGKHGTCEDCVLARDPYCAWSPPTATCVHQTESPSRGLIQEMSGDASVCPDKSKGSYRQHFFKHGGTAELKCSQKSNLARVFWKFQNGVLKAESPKYGLMGRKNLLIFNLSEGDSGVYQCLSEERVKNKTVFQVVAKHVLEVKVVPKPVVAPTLSVVQTEGSRIATKVLVASTQGSSPPTPAVQATSSGAITLPPKPAPTGTSCEPKIVINTVPQLHSEKTMYLKSSDNRLLMSLFLFFFVLFLCLFFYNCYKGYLPRQCLKFRSALLIGKKKPKSDFCDREQSLKETLVEPGSFSQQNGEHPKPALDTGYETEQDTITSKVPTDREDSQRIDDLSARTSPLTSSVS

SEQ ID NO: 83 - DNA, 2473 bp, Homo sapiens
ctgggcagccagccggccatgtgtgtctgccgggtgccccacaccaggtcccctccatgtgtctgtcctgtgttctgggctggtagctggaggagcgggaagcactgactcctgaagaccctggcttcgctttcctgtgtccgttgggctgtccacttctaagactctctttgtcccccgctgccttccgtattcctcagcagatggacccggcatttcttctgaggccctgaagaagtatcaagtgggctttgacattgcggtggtgagagcgacccctcctcacctggagaactgggaaatgtggattctcagggaccgcgctgttcacgagctccaggctgtgctgctggccctggtcctggggcgctgagccgcatctgcaatagcacacttgcccggccacctgctgccgtgagcctttgctgctgaagcccctggggtcgcctctacctgatgaggatgtgcacccccattagggggctgctcatggcccttgcagtgatgtttgggacagcgatggcatttgcacccataccccggatcacctgggagcacagagaggtgcacctggtgcagtttcatgagccagacatctacaactactcagccttgctgctgagcgaggacaaggacaccttgtacataggtgcccgggaggcggtcttcactgtgaacgcactcaacatctccgagaagcagcatgaggtgtattggaaggtctcagaagacaaaaaagcaaaatgtgcagaaaaggggaaatcaaaacagacagagtgcctcaactacatccgggtgctgcagccactcagcgccacttccctttacgtgtgtgggaccaacgcattccagccggcctgtgaccacctgaacttaacatcctttaagtttctggggaaaaatgaagatggcaaaggaagatgtccctttgacccagcacacagctacacatccgtcatggttgatggagaactttattcggggacgtcgtataattttttgggaagtgaacccatcatctcccgaaattcttcccacagtcctctgaggacagaatatgcaatcccttggctgaacgagcctagtttcgtgtttgctgacgtgatccgaaaaagcccagacagccccgacggcgaggatgacagggtctacttcttcttcacggaggtgtctgtggagtatgagtttgtgttcagggtgctgatcccacggatagcaagagtgtgcaagggggaccagggcggcctgaggaccttgcagaagaaatggacctccttcctgaaagcccgactcatctgctcccggccagacagcggcttggtcttcaatgtgctgcgggatgtcttcgtgctcaggtccccgggcctgaaggtgcctgtgttctatgcactcttcaccccacagctgaacaacgtggggctgtcggcagtgtgcgcctacaacctgtccacagccgaggaggtcttctcccacgggaagtacatgcagagcaccacagtggagcagtcccacaccaagtgggtgcgctataatggcccggtacccaagccgcggcctggagcgtgcatcgacagcgaggcacgggccgccaactacaccagctccttgaatttgccagacaagacgctgcagttcgttaaagaccaccctttgatggatgactcggtaaccccaatagacaacaggcccaggttaatcaagaaagatgtgaactacacccagatcgtggtggaccggacccaggccctggatgggactgtctatgatgtcatgtttgtcagcacagaccggggagctctgcacaaagccatcagcctcgagcacgctgttcacatcatcgaggagacccagctcttccaggactttgagccagtccagaccctgctgctgtcttcaaagaagctttacaggctgtggagaggtgggcactgctccatgaagacacctttttatgccctgagcttggggggtgtgcagactgcatctgtgggatatgatagtgatacagctgactcgtcaccgtggaaaatccacaagagaagtggttcgtctcatctgtaaagctgtctccacctgtggctgagactctggtctggcctgcaatactcccaagcagcccttggcaggggtgggtgggcgggcatccacgctggcctttagggggctgcctccctggccctggctcctaacgggacctccaaccaccttgtgggatccaggcccagtcagtcctctcctccctcagctgggagcaacaggcagaggaagagggcccctgtctggccgggtaagatacctacccttggcaggtgcgtatttgcaaacacccctccaggtcttctgtcctcttccctcccctgtatccacaaagcttgggagcctgggtccttttacgtggtcacctcccctctgctaatggagagttctccctcagatctgaaaggaaaagagaatgaaatagcctgagcaagtt

SEQ ID NO: 84 - protein, 530 aa, Homo sapiens
MRMCTPIRGLLMAVMFGTAMAFAPIPRITWEHREVHLVQFHEPDIYNYSALLLSEDKDTLYIGAREAVFTVNALNISEKQHEVYWKVSEDKKAKCAEKGKSKQTECLNYIRVLQPLSATSLYVCGTNAFQPACDHLNLTSFKFLGKNEDGKGRCPFDPAHSYTSVMVDGEKGTSYNFLGSEPIISRNSSHSPLRTEYAIPWLNEPSFVFADVIRKSPDSPDGEDDRVYFFFTEVSVEYEFVFRVLIPRIARVCKGDQGGLRTLQKKWTSFLKARLICSRPDSGLVFNVLRDVFVLRSPGLKVPVFYALFTPQLNNVGLSAVCAYNLSTAEEVFSHGKYMQSTTVEQSHTKWVRYNGPVPKPRPGACIDSEARAANYTSSLNLPDKTLQFVKDHPLMDDSVTPIDNRPRLIKKDVNYTQIVVDRTQALDGTVYDVMFVSTDRGALHKAISLEHAVHIIEETQLFQDFEPVQTLLLSSKKLYRLWRGGHCSMKTPFYALSLGGVQTASVGYDSDTADSSPWKIHKRSGSSHL

SEQ ID NO: 85 - DNA, 5097 bp, Homo sapiens
agcattggcaacccgctcgggtccccttccacactgtggaagctttgttctttcgctcttgctactgctagctctttgggtccacgctgcttttatgagctgtaacactcaccgcgaagatctgcagcttcactcctgagcccagcgagaccacgagcccaccgggaggaacgaacaactccagacgcgctgccttaagagctgtaacactcaccgtgaaggtctgcagcttcactcccgagccagcgagaccacgaacccaccagaaggaagaaactctgaacacatctgaacatcagaagggacagactccagacgcgccaccactctgctaacaccagatagtggaaagaaaccatgtgctgaaatgtttgacgacactgatggtttgactctgctaactggaatggcttattgtgcaagaaagtacacctggtcgggtcctggggctcatctctagcaccagcaaagatttctgaagacgtctttctagaaatgactggaaagtttcaagaggcataagatacagcatttcttctgaggccctgaagaagtatcaagtgggctttgacattgcggtggtgagagcgacccctcctcacctggagaactgggaaatgtggattctcagggaccgcgctgttcacgagctccaggctgtgctgctggccctggtcctggggcgctgagccgcatctgcaatagcacacttgcccggccacctgctgccgtgagcctttgctgctgaagcccctggggtcgcctctacctgatgaggatgtgcacccccattagggggctgctcatggcccttgcagtgatgtttgggacagcgatggcatttgcacccataccccggatcacctgggagcacagagaggtgcacctggtgcagtttcatgagccagacatctacaactactcagccttgctgctgagcgaggacaaggacaccttgtacataggtgcccgggaggcggtcttcactgtgaacgcactcaacatctccgagaagcagcatgaggtgtattggaaggtctcagaagacaaaaaagcaaaatgtgcagaaaaggggaaatcaaaacagacagagtgcctcaactacatccgggtgctgcagccactcagcgccacttccctttacgtgtgtgggaccaacgcattccagccggcctgtgaccacctgaacttaacatcctttaagtttctggggaaaaatgaagatggcaaaggaagatgtccctttgacccagcacacagctacacatccgtcatggttgatggagaactttattcggggacgtcgtataattttttgggaagtgaacccatcatctcccgaaattcttcccacagtcctctgaggacagaatatgcaatcccttggctgaacgagcctagtttcgtgtttgctgacgtgatccgaaaaagcccagacagccccgacggcgaggatgacagggtctacttcttcttcacggaggtgtctgtggagtatgagtttgtgttcagggtgctgatcccacggatagcaagagtgtgcaagggggaccagggcggcctgaggaccttgcagaagaaatggacctccttcctgaaagcccgactcatctgctcccggccagacagcggcttggtcttcaatgtgctgcgggatgtcttcgtgctcaggtccccgggcctgaaggtgcctgtgttctatgcactcttcaccccacagctgaacaacgtggggctgtcggcagtgtgcgcctacaacctgtccacagccgaggaggtcttctcccacgggaagtacatgcagagcaccacagtggagcagtcccacaccaagtgggtgcgctataatggcccggtacccaagccgcggcctggagcgtgcatcgacagcgaggcacgggccgccaactacaccagctccttgaatttgccagacaagacgctgcagttcgttaaagaccaccctttgatggatgactcggtaaccccaatagacaacaggcccaggttaatcaagaaagatgtgaactacacccagatcgtggtggaccggacccaggccctggatgggactgtctatgatgtcatgtttgtcagcacagaccggggagctctgcacaaagccatcagcctcgagcacgctgttcacatcatcgaggagacccagctcttccaggactttgagccagtccagaccctgctgctgtcttcaaagaagggcaacaggtttgtctatgctggctctaactcgggcgtggtccaggccccgctggccttctgtgggaagcacggcacctgcgaggactgtgtgctggcgcgggacccctactgcgcctggagcccgcccacagcgacctgcgtggctctgcaccagaccgagagccccagcaggggtttgattcaggagatgagcggcgatgcttctgtgtgcccggataaaagtaaaggaagttaccggcagcattttttcaagcacggtggcacagcggaactgaaatgctcccaaaaatccaacctggcccgggtcttttggaagttccagaatggcgtgttgaaggccgagagccccaagtacggtcttatgggcagaaaaaacttgctcatcttcaacttgtcagaaggagacagtggggtgtaccagtgcctgtcagaggagagggttaagaacaaaacggtcttccaagtggtcgccaagcacgtcctggaagtgaaggtggttccaaagcccgtagtggcccccaccttgtcagttgttcagacagaaggtagtaggattgccaccaaagtgttggtggcatccacccaagggtcttctcccccaaccccagccgtgcaggccacctcctccggggccatcacccttcctcccaagcctgcgcccaccggcacatcctgcgaaccaaagatcgtcatcaacacggtcccccagctccactcggagaaaaccatgtatcttaagtccagcgacaaccgcctcctcatgtccctcttcctcttcttctttgttctcttcctctgcctctttttctacaactgctataagggatacctgcccagacagtgcttgaaattccgctcggccctactaattgggaagaagaagcccaagtcagatttctgtgaccgtgagcagagcctgaaggagacgttagtagagccagggagcttctcccagcagaatggggagcaccccaagccagccctggacaccggctatgagaccgagcaagacaccatcaccagcaaagtccccacggatagggaggactcacagaggatcgacgacctttctgccaggacaagccctttgacgtcaagtgtgagctgaagttcgctgactcagacgcagatggagactgaggccggctgtgcatccccgctggtgcctcggctgcgacgtgtccaggcgtggagagttttgtgtttctcctgttcagtatccgagtctcgtgcagtgctgcgtaggttagcccgcatcgtgcagacaacctcagtcctcttgtctattttctcttgggttgagcctgtgacttggtttctctttgtccttttggaaaaatgacaagcattgcatcccagtcttgtgttccgaagtcagtcggagtacttgaagaaggcccacgggcggcacggagttcctgagccctttctgtagtgggggaaaggtggctggacctctgttggctgagaagagcatcccttcagcttcccctccccgtagcagccactaaaagattatttaattccagattggaaatgacattttagtttatcagattggtaacttatcgcctgttgtccagattggcacgaaccttttcttccacttaattatttttttaggattttgctttgattgtgtttatgtcatgggtcatttttttttagttacagaagcagttgtgttaatatttagaagaagatgtatatcttccagattttgttatatatttggcataaaatacggcttacgttgcttaagattctcagggataaacttccttttgctaaatgcattctttctgcttttagaaatgtagacataaacactccccggagcccactcaccttttttctttttctttttttttttttaactttattccttgagggaagcattgtttttggagagattttctttctgtacttcgttttacttttctttttttttaacttttactctctcgaagaagaggaccttcccacatccacgaggtgggttttgagcaagggaaggtagcctggatgagctgagtggagccaggctggcccagagctgagatgggagtgcggtacaatctggagcccacagctgtcggtcagaacctcctgtgagacagatggaaccttcacaagggcgcctttggttctctgaacatctcctttctcttcttgcttcaattgcatacccactgcctgcccagactttctatccagcctcactgagctgcccactactggaagggaactgggcctcggtggccggggccgcgagctgtgaccacagcaccctcaagcatacggcgctgttcctgccactgtcctgaagatgtgaatgggtggtacgatttcaacactggttaatttcacactccatctccccgctttgtaaatacccatcgggaagagactttttttccatggtgaagagcaataaactctggatgtttgtgcgcgtgtgtggacagtcttatcttccagcatgataggatttgaccattttggtgtaaacatttgtgttttataagatttaccttgtttttatttttctactttgaattgtatacatttggaaagtacccaaataaatgagaagcttctatccttgatttggggaagacattccttagcggaggctgtgcagcctcccgcccctgcatggcccaggcgggacagctgggctcgctcttttctgtccgtttcctgctgtgttttgccctctctggcctgtgacgtgctcctggcgacttcttcctcagtgccctctcttttctgtcctctctgtctcacagcctcgtctcctaagcccctccctcctcctggctcctcttccctgtcctgtctgggccatgtgggggacaggaggctttcctctcc

SEQ ID NO: 86 - protein, 845 aa, Homo sapiens; identical to SEQ ID NO: 82

SEQ ID NO: 87 - DNA, 1405 bp, Homo sapiens
cctgagtgaccaggcacagcacgtgcacgccctggggaacttctacctcttctgccaggccacagttctcgcctctaggaagtggaattatcagtggaagatgatacggaaagatccactgatggccctggcacaggccagccttgtccctggggcaggatgggacggtcctgagaaggccctgggacaccctaggggtgtcatagtgggaactatgcctttgcagtgcccagaaagagatggatagtttaaaaacgaatacatggaacgtcctgcagacattcgctttgtctgggagaagaatgggcgagctctggagacctgtgtccctgtgcagacccatgcactgcccgatggcagggcccatgcactcagctggctgcaggacgccatcagggaaagcgctgagtatcgctgctctgtcctctcctcagcagggaacaagacttcgaaggtgcaggttgctgtgatgagacctgaagtgacccaccaggagaggtggaccagagagctctctgcctggaaggctgtggctggggagcacgaccggatgatgcagagctggaggaaggcgtgggaaagctgtagcaaggacaccctgtagccaccaggaaggagtccctgacaccgacctcaaccccaacaagaccctgctgccactgaccacagccacccccggagaaggcctggtcccccacaactgtgaactgtcttgcccaagcctgctctgaacacagccattgggccaccacctgatgggcagaggcgggacagtggagaagcctggaacccaagtgggcctgtgacaggaactaagacttaaaaaattaggtgcttacctgggacagtaagttctgtctggcacaagcaggtaaccaggatggctaacaggctttgatagctgctcgtgaactaaaacagcagggtgtgtgcaggttcctcctctacggtcaggcagcaggctctgaaggctgatcctacaccgtcccagtgactccccttgacagagtgcccccaccccctaatagccaacagggttagcatggccagcacagatcgctgcttttattgatgcaaatcaagcctgctgcttctcctccctgcagacttagccaaggaactccaagatgcatgactgggacaagaaaaggtgagactccacatggaaatgccttgccctaaaccttgaatgactgtgagatgcgatctgggagtgcatctgtcaagtctttgtgttttcttcactaacctcagaatactgggctctattttatcaagcgctgcagtttatgcctctgtcccgtcaatgctcagcttctgcaacaggacaccaaacttgatgcagaaagccaaataggtcaattatgcaaatctcctggtgccatattaaatttcttgacgatgg

SEQ ID NO: 88 - protein, 113 aa, Homo sapiens [sequence omitted]

SEQ ID NO: 89 - DNA, 3790 bp, Homo sapiens
agcattggcaacccgctcgggtccccttccacactgtggaagctttgttctttcgctcttgctactgctagctctttgggtccacgctgcttttatgagctgtaacactcaccgcgaagatctgcagcttcactcctgagcccagcgagaccacgagcccaccgggaggaacgaacaactccagacgcgctgccttaagagctgtaacactcaccgtgaaggtctgcagcttcactcccgagccagcgagaccacgaacccaccagaaggaagaaactctgaacacatctgaacatcagaagggacagactccagacgcgccaccactctgctaacaccagatagtggaaagaaaccatgtgctgaaatgtttgacgacactgatggtttgactctgctaactggaatggcttattgtgcaagaaagtacacctggtcgggtcctggggctcatctctagcaccagcaaagatttctgaagacgtctttctagaaatgactggaaagtttcaagaggcataagatacagcatttcttctgaggccctgaagaagtatcaagtgggctttgacattgcggtggtgagagcgacccctcctcacctggagaactgggaaatgtggattctcagggaccgcgctgttcacgagctccaggctgtgctgctggccctggtcctggggcgctgagccgcatctgcaatagcacacttgcccggccacctgctgccgtgagcctttgctgctgaagcccctggggtcgcctctacctgatgaggatgtgcacccccattagggggctgctcatggcccttgcagtgatgtttgggacagcgatggcatttgcacccataccccggatcacctgggagcacagagaggtgcacctggtgcagtttcatgagccagacatctacaactactcagccttgctgctgagcgaggacaaggacaccttgtacataggtgcccgggaggcggtcttcactgtgaacgcactcaacatctccgagaagcagcatgaggtgtattggaaggtctcagaagacaaaaaagcaaaatgtgcagaaaaggggaaatcaaaacagacagagtgcctcaactacatccgggtgctgcagccactcagcgccacttccctttacgtgtgtgggaccaacgcattccagccggcctgtgaccacctgaacttaacatcctttaagtttctggggaaaaatgaagatggcaaaggaagatgtccctttgacccagcacacagctacacatccgtcatggttgatggagaactttattcggggacgtcgtataattttttgggaagtgaacccatcatctcccgaaattcttcccacagtcctctgaggacagaatatgcaatcccttggctgaacgagcctagtttcgtgtttgctgacgtgatccgaaaaagcccagacagccccgacggcgaggatgacagggtctacttcttcttcacggaggtgtctgtggagtatgagtttgtgttcagggtgctgatcccacggatagcaagagtgtgcaagggggaccagggcggcctgaggaccttgcagaagaaatggacctccttcctgaaagcccgactcatctgctcccggccagacagcggcttggtcttcaatgtgctgcgggatgtcttcgtgctcaggtccccgggcctgaaggtgcctgtgttctatgcactcttcaccccacagctgaacaacgtggggctgtcggcagtgtgcgcctacaacctgtccacagccgaggaggtcttctcccacgggaagtacatgcagagcaccacagtggagcagtcccacaccaagtgggtgcgctataatggcccggtacccaagccgcggcctggagcgtgcatcgacagcgaggcacgggccgccaactacaccagctccttgaatttgccagacaagacgctgcagttcgttaaagaccaccctttgatggatgactcggtaaccccaatagacaacaggcccaggttaatcaagaaagatgtgaactacacccagatcgtggtggaccggacccaggccctggatgggactgtctatgatgtcatgtttgtcagcacagaccggggagctctgcacaaagccatcagcctcgagcacgctgttcacatcatcgaggagacccagctcttccaggactttgagccagtccagaccctgctgctgtcttcaaagaagggcaacaggtttgtctatgctggctctaactcgggcgtggtccaggccccgctggccttctgtgggaagcacggcacctgcgaggactgtgtgctggcgcgggacccctactgcgcctggagcccgcccacagcgacctgcgtggctctgcaccagaccgagagccccagcaggggtttgattcaggagatgagcggcgatgcttctgtgtgcccggcctcgtctcctaagcccctccctcctcctggctcctcttccctgtcctgtctgggccatgtgggggacaggaggctttcctctccctggaccccctggccagcctcgggtgcggggcccgacagcagctcgagggtctccttgctgccgcccttcctgagtgaccaggcacagcacgtgcacgccctggggaacttctacctcttctgccaggccacaggtcctgcagacattcgctttgtctgggagaagaatgggcgagctctggagacctgtgtccctgtgcagacccatgcactgcccgatggcagggcccatgcactcagctggctgcaggacgccatcagggaaagcgctgagtatcgctgctctgtcctctcctcagcagggaacaagacttcgaaggtgcaggttgctgtgatgagacctgaagtgacccaccaggagaggtggaccagagagctctctgcctggaaggctgtggctggggagcacgaccggatgatgcagagctggaggaaggcgtgggaaagctgtagcaaggacaccctgtagccaccaggaaggagtccctgacaccgacctcaaccccaacaagaccctgctgccactgaccacagccacccccggagaaggcctggtcccccacaactgtgaactgtcttgcccaagcctgctctgaacacagccattgggccaccacctgatgggcagaggcgggacagtggagaagcctggaacccaagtgggcctgtgacaggaactaagacttaaaaaattaggtgcttacctgggacagtaagttctgtctggcacaagcaggtaaccaggatggctaacaggctttgatagctgctcgtgaactaaaacagcagggtgtgtgcaggttcctcctctacggtcaggcagcaggctctgaaggctgatcctacaccgtcccagtgactccccttgacagagtgcccccaccccctaatagccaacagggttagcatggccagcacagatcgctgcttttattgatgcaaatcaagcctgctgcttctcctccctgcagacttagccaaggaactccaagatgcatgactgggacaagaaaaggtgagactccacatggaaatgccttgccctaaaccttgaatgactgtgagatgcgatctgggagtgcatctgtcaagtctttgtgttttcttcactaacctcagaatactgggctctattttatcaagcgctgcagtttatgcctctgtcccgtcaatgctcagcttctgcaacaggacaccaaacttgatgcagaaagccaaataggtcaattatgcaaatctcctggtgccatattaaatttcttgacgatgg

SEQ ID NO: 90 - protein, 732 aa, Homo sapiens
MRMCTPIRGLLMAVMFGTAMAFAPIPRITWEHREVHLVQFHEPDIYNYSALLLSEDKDTLYIGAREAVFTVNALNISEKQHEVYWKVSEDKKAKCAEKGKSKQTECLNYIRVLQPLSATSLYVCGTNAFQPACDHLNLTSFKFLGKNEDGKGRCPFDPAHSYTSVMVDGEKGTSYNFLGSEPIISRNSSHSPLRTEYAIPWLNEPSFVFADVIRKSPDSPDGEDDRVYFFFTEVSVEYEFVFRVLIPRIARVCKGDQGGLRTLQKKWTSFLKARLICSRPDSGLVFNVLRDVFVLRSPGLKVPVFYALFTPQLNNVGLSAVCAYNLSTAEEVFSHGKYMQSTTVEQSHTKWVRYNGPVPKPRPGACIDSEARAANYTSSLNLPDKTLQFVKDHPLMDDSVTPIDNRPRLIKKDVNYTQIVVDRTQALDGTVYDVMFVSTDRGALHKAISLEHAVHIIEETQLFQDFEPVQTLLLSSKKGNRFVYAGSNSGVVQAPLAFCGKHGTCEDCVLARDPYCAWSPPTATCVHQTESPSRGLIQEMSGDASVCPASSPKPLPPPGSSSLSCLGHVGDRRLSSPWTPWPASGAGPDSSSRVSLLPPFLSDQAQHVHALGNFYLFCQATGPADIRFVWEKNGRALETCVPVQTHALPDGRAHALSWLQDAIRESAEYRCSVLSSAGNKTSKVQVAVMRPEVTHQERWTRELSAWKAVAGEHDRMMQSWRKAWESCSKDTL

SEQ ID NO: 91 - DNA, 190242 bp, Mus musculus
  misc_feature (1)...(190242): n = A,T,C or G
taggtgactgaaacagatgcagatacccacagtcaaacattggtcctatggaagttgggggaaggattgaaggccctgcatgggataggaagtccgcaagaaaaccaacaaagtcaactaacctagacccctgggaaccaccaagaaaagggaatgcaggggctggacagaggcaactgctacaccacatatagtagatatgtaactagaacttcatttgggtttctaacatctagaatgggaactgtccctaaagctgtatcctgtttgtgaaatggatttcccaacatggctgccttgcctggcctcagtgcaagaagatttgcctaatcttgcagagacttggtgtgcaaaggtggcaggttatccaaggtgaggaccgccctctcagagaagaaggagaggtggcggagaaaaataaataagtacttcttaaaaactaataaaaaatatatgcaagtaccaatagatgagcagctgtgtacatttgaaaaaggacaggagtctgcgcaggtgaaagcttggactacaaaagctaacagcttctgggacaggcagaagccacacagcttctggggcagagcccattttgggctccagacatccaggtaccttccctaccagaggagaggtttccaccctgcctggggggggggggttgctagagcacttgggggaaatatcttggttccctgatccctcagagactagtctgtgtaggtgagagtgcctactacagaagctacacagcttctgggacaggccctgtctcaagccttcatcttttgccaggagacaggtccaaacgccagatatctgtgcaccttccctgtaagaggagagtttgcctgcagagagtactctgatcactgaaactcaggagagaactagtctcccaggtctgctgatagaagctaacagaatcaaaggaggaacaagctctaaccacagacaactataacaactaactccagagattaccagatggagaaagaaaaacataaggatcttactaacagacaccaagaccactcaccatcatcagaacccagcacttccacctcaacaagtcctggataccacaaaacaaccgaaaagctagacccggatttaaaagcatatctcatgaagatggtagaggacatcaagaaggactttaatactcacttaaagaaatacaggataacactgctaaagaggtacaagtccttaaagaaaaagaggaaaacacaaccaaacaggtgatggaattgaaaaaaaccatacaagacctaaaaaggcaaatagacacaataaagaaaacccaaagtgaggtaatactggagatagaaaacgtagggaagaaagctggaaccatagattggagcatcagcaacagaatgcaannnnnnnnnnnnnnnnnnnnatgcaagagatggaagagacaatctcaggtgcagaagattccatagaggacattggcacaacaatcaaagaaaatgcaaaatgtaaaatgcaaaaagatcctaactcaaaacatccaggaaatccaggaaacaatgagaagaccaaacctacagaaaataggagtagatgagaatgaagattttcaacttaaagggccagcaaatatcttcaacaaaattatagaagaaaacttctcaaacctaaagaaagacatgcccatgaacatacaagaagcctacagaactccaaatagactggaccagaaaagaaattcctctcgacacataataattagaacaacaaatacactaaataaagatagaatattaaaagcagtaagagaaaaaggtcaagtaacatataaaggcaggcctattagaattaaaccagacttttcaccagagactatgaaagccagaagatcccagacagatattatacagacactaagagaacacaaatgccagaccaggcttctatacccagccaaactttcaattaccttagatggagaagcaaaagtattccatgacaaaaccaaattaccacaatatctttccacgaacccagccttcaaagtataatgacagaaaaaaaaaaaaaaacaatacaaggacggaaaccatgccctagaaaaagcaagaaagtaatccttcaacaaacctaaaagaagacagccacaagcacagaatggcaactctaacaacaaaaataataggaagtgtactggctagttttgtgtcaacttgacacagctggagttatcacagagaaaggagcttcagttgaggaaatgcctccatgagatccaactgtaaagcattttctcaattagtgatcaagggggaaaggccccctgtgggtgggaccatctctgggctggtagtcttgggttttataagagagcaggctgagcaagccaggtgaggcaagccagtaaagaacatccctccatggcctctgcatcagctcctgctccctgacctgcttgagttccagtcctgacttcctttggtgatgaacagcagcatggaagtataagccgaataaaccctttcctccccaacttgcttcttgatcatgatgtttgtgtaggaatagaaaccctgactaagacaggaagcaacaattacttttccttaatacctcttaatatcaattgtctcatttccccagtaaaaagacatagactaacagactggctacacaaacaggacccaacattttgctgtttacaggaaacccatctcagggaaaaagacagccactacctcaaagtgaaatgctggaaaacacttttccaagcaaatggtctgaagaaacaagctggagtagccattctaatatcagataaaattgacttccaacaaaaagttatcaaaaaagacaaggaggggcacttcatactcatcaaaggtaaaattctccaagaggaactctcaattctgaatatctatgctccaaatgcaagggcaatcacattcattaaagaaactttagtaaaactcaaagcacacattgaacctcacacaataatagtggagacttcaacacaccactttcaacaatggacagatcgtgaaaacagaaactaaacagggacacactgaaactaacagaagttatgaaacaaatgaacttaacagatatctacagaacattttatcctaaaacaaaaggatataccttcttctcagaacctcatggtaccatctccaaaattgaccatataattggtcacaaaacaggcctcaacagatacaaaaatattgaaattgtcccatgcatcctatcagatcaccatggactaaggctgatcttcaataacaacacaaataatagaaagccagcattaacgtggaaactgaacaacactcttctcaatgatagcttggtcaaggaaggaataaagaaaaaaattatagactttttagagtttaatgaaaatgaagacacaacatacttgaacttatgggacacaatgaaagcatttctaagaggaaaactcatagctctgagtacctccaaaaagaaactagagagagcacgcactagcagcttgacaaaacacccaaaagctctagaacaaaaggaagcgaattcacccaagtggagaagatggcaggaaataatcaaactcaggagcgaaatcaaccaggtagaaacaagaactattcaaagaatcaaccaaatgaggagctggttctttgagaaaatcaagaagatagataaacccatagacagactcactagaaggcacagggacagcatcctaattaacaaaatcagaaatgaaatgggagacataataacagatcctgaagaaatccaaaacaccatcagatccttctacaaaaggctatactcaacaaaactggagaacctggatgaaatgaacaaatttctaggcagataccaggtacaaaggttaaatcaggatcaggttaatgagctaaacagtcctatatcccctaaagaaatagaagcagtcattaatagtctgtcaaccaaaaaaagcccaggaccagatggatttagtacagagttatatcagaccttcaaagaagatctaattccaattcttcacaaactattccacaaaatagaagcagaagatactgtaccaaattcattctatgaagccacaattactctgatacctaaaccagagaaagacccaacaaagatagagaacttcagaccaatttcccttatgaatatcgatgcaaaaatactcaatataattcttgctacccgaatccaagaacacatcaaaataatcatcgatcctgatgaagtaggtttcattccagggatgcagggatggtttaacatacagaaatccattaacggaatccactatataaacaaactcaaagacaaaaaccacatgatcatttccttagatgcggagaaagcattggaaaaaatccaacacccattcatgataaaagtcctagaaagaacacaaattcgaggcccatgcctaaacatgataaaagcaatctacagcaaaccagtagccaacatcaaagtaaatggtgagaagctggaagcaatcccactaaaatcagggactagacaaggctgcccactttctccctacctcttcaacatagtacttgaagtcctagccagagcaatttgacaacaaaaggagatcaaggggatacaaattggaaaggaagaagtcaaaatatcactttttgcagatgatatgatagtatatatatgtgaccctaaaaattccaccagagaactcctaagcctgataaacagcttcagtgaagtagctggatataaaattaactcaaacaagtcaatggcctttctctacccaaagataaacaggctgagaaagaaattagggaaacaacacccttcacaatagtcacaaaagaaattagggaaacaacacccttcacaatagtcacaaataatataaaataccttggcgtgactctaactaaggaagtgaaagatctgtatgataagaacttcaagtctctgaagaaagaaattaaacaagatctcagaagatggaaagatctcccatgctcatggattggcaggatcaacattgtaaaaatggctatcttgccaaaagcaatctacagattcaatgcactccccatcaaaattccaactcaattcttcaacgaattagaaagagcaatctgcaaattcatctggaataacaaaaaacctagaatagcaaaaactcttctcaatgataaaagaacctctgggggaatcaccatgcctgacctaaaggtgcactacagagcaattgtgattaaaaactgcatggtactggtatagcgactgacaagtagaccaatggaatagaattgaagacccagaaatgaacccacacacctgtggtcacttgatctttgacaagggagctaaaaccatccagtagaaaaaagacagcattttcaacaaatggtgctgacacaactggaggttatcatgtagaagaatgcgaattgatccattcctatctccttgtactaaggtcaaatctaagtggatcaaggaactccacataaaaccagagacagtgaaacttatagaggagaaagtggggaaaagcctcgaagatatgggtacaagggaaatattcctgaatagaacagcagtggcttctgctgtaaaattgagaatcgacagatgggacttcataaaattgcaaagcttctgcaaggcaaaagacaccgtcaataagacaaaaaggccaccaacagattgggaaaggatctttacctatcctaaatcagataggggactaatatccaatatatataaagatctcaagaaggtggacccctgaaaatcaaataaccccattaaaaatggggctcagggctaaaaaaagaattctcacctgaggaatactgaatagctgagaagcccctgaaaaaatgttcagcatccttaatcatcagggaaatgcaaatcaaacaaccctgagattttacctcataccaatcagaatggctaaggtcaaaaattaaggtgacagcagatgctggcaaggatctggagaaagatgaacactcctccattgttgatgggattgcaagcttgtacagccactctggaaatcagtctggcctgtcctcagaaaattggaggatcccgcaatacctctgctgggcatatatccagaagatgttccaactggtaagaaggacacatgctccactatgttcatagcagccttatttataatagccagaagctggaaagaacccagatgtccctcaacagaggaatggatacagaaattgtggtacatttacacaatggagtactactcagctatttaaaagaatgaatttatgaaattcctaggcaaatggatggacctggatggcatcatcctgagtgaggtaacccaatcacaaaagaactcacatgatatgtactcactgataagtggatcttagcctaggaacttagaaaacccaagatacaagatacaatttgcaaatcacatgaagcttaagaagaatgaagaccaaagtgtggacactttgcctcttcttagaattgggaacaaaatacccatggaaggagttacagagacaaagtttggaggtgagaggaaaggatggaccatctagagactgccatacccggggatccatcccataatcagtctccaaacgctgacaccatagcatatactagcaagatttggctgaaaggaccatgatatagctgtctcttgtgagactatgcaggggcctagcaaacacagaagtggatgctcacagtcagctattggatggaacacagggcccccaatggaggagctagagaaagtacccaaggagctaaaggggtctgcaaccctataggtggaacaacaatatgaactaaccagtactcccggagcttgtgtctctagctgcatatgcagcagaagatggcctagttggtcatcattgtgaagagaggccccttggtcttgcaaactttatatgcctcagtaagggggaatgccagggccaagaagtgggattggttggttaggggagggtatgggggactttggggacagcatttgaaatgtaattgaagaaaatacctaattaaaaaaaagtctcagctaataaagggaattataacttacaaaaaaagaaaagggacaggtatgtgttcatgtctcagtgatgtcttccattcaagatgggacaagaaagaaagaaagaaagaaagaaagaaagaaagaaagaaagaaagaaagaaagaaagaaagaaagaaagggagaaagggagaaagggagaaagggagaaagggagaaaggaagaaaggaagaaaggaagaaagaaagaaagaaagaaagaaagaaagaaagaaagaaagaaagaaagaaagaaagaaaacaagcaagcaagaaaggtatgtatgtgatttggagcaatctttttcaactttacaaatatagatgtaattgtgttttgttagcagtatcagtatctgttgtggtgtttctcgcatttcctatttattaaagaatagaaagctatctccaattggtaaaagtgaaatctagaaacaaaagtgtcccctgtgtaaaggagaaaggagagaggctgtgccagaaaccctggaatagcagggagacatggggaagtggagaaatgcggcgtcctaaaggagagctcacagaaagcaggggaaaggccaaggtaaccctgcctggagagcagctcgcgggcagccatggcagaagaggaagaaccaaatagtgaccaaaacagtagagttgatggattttcttgtaggactaggaaagttaccctgaacctcttggattataagtttatcaccagacatgcaggcattgttattcggctcctccttgggtgttgctggtctgcacccaaggctaggaatagccaaatccaaggaaagtaagtcaagaaggctgtggatgtgtgacgctttcctaaactgtgaatcatcccaagtgccagctgggccaggaacaatctgagaaagctgtggaagggaactcatggctaggaaataggaaggcaaaacaaaacaggcaaggaaagaaaaccgtgaagaccataaggttttattagcgtgattggcattttacagactccatcaacattatagctattcccctgctgagcctggtttacactaagtgaaactcgtgcaagtcaaatgaatagcgatatccaaaacattgctagtgtgttaccttaaactgtggggtgaggtcttggagacagtgagcagatacagagtcaagacacagctggatgaatcagcaagacaagacacacactgaggcagatgcagatctaagcaaacggagaacacgaggaagtgggtgaatggttccagtgtgtgcagaaggagagagtcatggtctagctatggagcaaagggaagctggcctcacagatgacttccctcagcatctcagtaacaggagagcacaaggaaatttacgactgtgaacgcctgcctgtggcttggggtcagggtatatgctgcacagcaaagcagaaagccatgaccttctctccaaatagcatgtggattagtcacttaccctgttctggaacctacttctgctgtgcagcaggaacgcagacgtctaggaaccacaaggaaatcgaacagttttccattgccaaaggtgattctccctctcttctcattatctgttagaatagtcaaggaaaattacactttactgagtaacccccagcctttcaaaggtcacacaggaatataatcactaacctctggtggttcacgatggtttagacactttaataatatgatgatctacctacacgggcatcctgttaagttttgtgctagataatttcccccaaattcagtcaaatatacaagttctaagcatatctgataggcaagacaaggctagattatgatgttcaacaggtgtttttattcttttttttttcttaaaatatcttaaacttaacaatgggttcattgtggtgtaacttggccactaagaatgtctgtattctgccattggagaggatactcgttagttttgaaaatgaacgggcactgtattatacactctcaaaggtaattgtgagcaatggtccacctcagccaccagaagccggcatagtctgtgcacagcagatacacaccccacagcctctgaaaaccaggggtagatcatggtttatcttgtgcaggtcatgtgtgaacgcctcttctaatgcaagagaatcgcctaaacgtcatgggatttccagcagcttcctgcagtgtggcagaaagccattaacgaatgtgatttgccagttattgtaaagtgtcaatcaaatcagaggaagaaaaagcaatgtttcaatgattaaaaaaaatattcaatagcttgttcaaaataaccacccatcgtggccctctaacttacctaacaacgggacacagtgttaatcaatggcatcacttacctgttcagagataactatttgatccaagtagctattggtatttgttgttttaatagtttattttcaagagaacatagggaggggtgcaagaggaaaagcagtgttttgttaataccaaagacataatataaaacaaccctcagatggtgcagcttatttgaggaggtacattctgcatttgcggaaaggagccgactcgtgggttgctgaggatgttggtgtatctactattttgatgtggctgagcataaagtagagccctggaagttctgctgtgttaaaaaatagaaagcaacgcgtcctttaagggtccctgtttattcttcctcgaccactttcctctgactcctcctccttcccagggaaggtgtgattccaatccctagagccccctcaagtattgtcaagcggctggctgctgggtgttgcttgctgggaagtacggaaagaaatttgacaccgaatctcatcttggctactgggagaaataccatctttgaggtcacaggacttaaaggacatttctattattgttttgtctctttactggtagtcttgatggaagaaggtcccctgatcatgcgaaacggatccgggagaaatcagacattaccttgtccaccttttctctgcattctgattcccccaactatctccgtcaccttataaaactggcaggctctggaccttttgcacgctggagaaaaatcactgttttgcctccagcaaggaacatgcatgttgcaacactgactcctcctctagtgaagaaagagtgaacaagtgcaccgagttgagcttcttctcagagacacgcggctggcgacggcagagcagaggctaaaatccccagactgccgggtcttctgagctgggctttccccgccttcctgctctgtctcactcactcctctcctgcgttctggattttacacggggctcaggaaacagctttacctgtcactgaaaaagctcgcgttctttgcaagaagtgctcaatccctggtatggcagacttttctctccagcagaagtgagtacccatgtcagacaaggctgtgcgtggccaggggtggtgcgggcgggcgctctccagggccgcgggttcgaggccgcgagtgggagtggaacagttggctgcaggcgcggacagcttagggaaatgccagctagctgccagagcccgcgggcgcgaggaaaccccatcccgtgctgtgagcgtgcctgaagccaaaccttggtgtccctttcgagaaaagctaaatatatgccaaggggcttggccacccaccccagcttttacaactgctctcggtgtgttttaaaataaaccctgcaagcgcgcccttgcgaatgagtttcggtggtgtgatggtggggttgcaggtggtttgtgtcgaaatgaaaagctggggagatagcggggaggctgaatgggctggggcaggagacgtggtggcagctaacttgggcagtctcctgccggctgcacagctgggtgccaggtgaagagacagtcacctgagctcccacccccactccctaaggcagctaagcggagtctgggcagtgtgctaggaattcaggccctaggggtagaagcaaggacacactgctggagcaaagatcatgggatcaggggacagaggggatagcctcccagaacccagactcttaatgctgaggcagggggaggcaagggctgtagttgtgtagaaaaatatcctgttagtgacctctacctgtgtggtagggaagcaacccacgttcccttaataacaagcaacttggggttttctgtgatcgaacttgaaaatgtttgcaacctgttattaatgtcacgggggggggggtcgggggggagcgtcctttaatcttcattcatggaattggctgggaaagatttcccaccggagtgtcttgaccaatcctagctctgcctcccgtggcactacaatcgtgggagttcaccttctcctggcctcagtttactgtgtgtacatttagggaaactgatcattcttgctacaagtgctgaatggaacagaggtgctgagtagagcagaaaccggaatattttgattttttgtttcagtggcgttttgtttttttttttctcaaagtgatttcttcgcaaatcgatcccttttgagaagcgattgtgagttatttccccagggtggaaactgtacttagggaacagatgaagaatttttaaggacaccccttgttgtccatgccagaaaaccccttgtctttgaggatgctgcatcaggacgcatctcaccaagcttttgctggcggctgtactggatgtgggagtagactgggagggtctgaagcaactgcgctgttcagagagatggctcgccttcctagagctgcccacacagagatcgttcatcatcaatctttgcacttcttccagacctggcttctcaactcttaatggcggaccatagagcaatggttctcagccttcccaatgctgtgaccctttaatacagttccccatgttgtgtgacctctggctataaaatcattttctttgttactgttatgcatcttaacacaaatatctgtgttttccgatggtcttaggtgacctctgtgaaaaggttgtttatccccccccccacccccccaccaacaaggtcgaaccccacaggatgataaccactaccccggagatttctgtccacaaacaactctggaaagcaacctatgggggcgggggtggggggtgggggggagatgtcagtgtccacagaaaccaatgcccttcagggcaactggctgggagtcagagaacagggccaaggcttggttggagacaaagcttagtttgctccccaagcacagtgtggctagatacttcgggtatatatactttgtataacacattaggcctagagccaagatctagagcattaggaaggtcggagaaccactggtctagagcgtctcacaccttccagtaactagagtcttctgccagcagagcagaagttgtacagcagagagcaggagatgttcagcagagagcaggaggcactggggccctggaggctgtgcttcaaattgtagctacaattcagagagtcactggagctctctgtgcctctcttttcctggctgcaagatggggaataattctacttctgcacgtggtagctgagtaaatagccatgttcagtgatcaactgttctcattaatgttaatgtgtggcgttgcaagtgcccactggtctcgtggtctttagagcagctctctatcctatggggcttttattaccaggagactgaatgataccagctcattagcctccaagatgagagagagagagagattcagaatgcaggatcaagtttactctcttaactttgctatagcaagcacttctcagattggcatggattctcagcctttcttccccgtccattttggcctatgatttttgaatacacaatagccatctttgcctatagctataagcaatcgagtatgaaaccagagaagtcccccagacctatctccaaacatagtacaaattgtttctgtcaaaataatggctcttttgctatgtttcgttgctcggtacaagttaagatttcaactcgacttagcatctcttccacctccctggcctctcaggttcaagcagaagaaaatatcaaaccttttttaaaaaaaaaaaaaaaagaggaaattgcatatgcacagagtaggaaagattgatgatcttcgtgttctttggagtgcttacatgcagagattgtaatgttgatacctgccactgaacctttatagcagagggtattcaatccttccatacagagcctcagatgattctcacagatacactgaaggtatgagttaccatgtaaagttttacagatgaggaaagtgaggactacaagcatttgcttaatttacccaacccacactttggtaggagccctagtctgtcagactttgacatctgtttcattccccattatccaactctgccaaccttcccaatatcagaacattacatcatgccaactggacttggattgttttcaagggcagggacaaccacacgtggtggatggttttaagtgatgtgaacagattcttgtggtacatattaacaaatcacttgtggatagcatttttctgactctttccgagctcggctggtaaatttcagataggagagattcagtataagcagataaggctgaggccggctggctgtcactcacttccgggcagttcattcaagttcaaagaactctgggatttttgttttctactagtttttgtgtgaagacactatttacatttgcttccagtattaaagattcactcatttattctgctgtgctctactgtgtgtgtggttacacaagggaagaacgagcagaaatctagcttttgtggagcttctatgtaaggaacagaggtagttaacaggtagatgaagaaacacatagagatcattcaggatctggtgagacagccccgtgggtaaagacatctgtcatgaaagccaggagactcgagcgcaatcaatggaacccatcaaatgttgaaggaaagaaccaagtctacaaagttgacttctgtccacaacataaatgttgtggcactcatgtccataaggatacatagtgcatgtacgtaaaataatgatgacaataaataaatctgtcttaaaagtcattccagatattgataaattctatgaagaaaacacagagtttgtagaatcgcatggggttcttgaggacttgaactgaggcgaatcccaagagaaaggtgcttgacctgtaacaaatactctaaattccaaacgtgtagcgccccatacacacacacacacacacacacacacacaaagcaaatttgttcctcatcttagtttgtgtattaaaattataaactttatataaactagtttagatggaaaattaattaaatttgcctactagcttttaatttgttttaatgtggcttaatagaaattttcaatcacattacctagtgacttacatttgcttgacacagcactacttaagagtgatacttgaccaagatgtaagaagaatatcctccttctactttctcttagacatatctttatttctctaggtttggctaacattcttctcatgcctgcctcaaattcagttacttgtaaaaaaaaaaaaaaaaggtcttgtcccatccctaatactcagagtgtgcaggtaatacgtttaaagccaatcccttcctgctggtatgaaattaactctgtggctgcatttgtcgtcagggtgcagtcccttgtatagggaaaatctcaagaacctcttccactaaatccaataaataaccaaaggaacattaaaaaaaataataataattttaaaagctggatatatatatatagctttatctttaaattgcttcctaaagtaatgtgtttgtatcttgtagcattttggaaagcctaggacacaatcactaggatttcacacacatgttcatccttgggtcatcaccattgtttctcttactggtctcttggtttaaaacagctggaacaagaagcagcctggatctctagaacagctccaggagcgtcacaggagtctgcctttggtttctttgttccctggctaaaatgacacttgggcatatcactgaaagaaagatataatttgttcctgcagttccgtttactgcaaagggagggatagtcagatgctagaatgggaggtggcctctgccttgggagatcaagcatccagagtctaagattgtctcgttcgctgattagtgtattatgctcactttctttcttccaaaaatatcaaaataagtttagacttgacataataatggcaccaaagatgataatgaaatatgctataaaaatccatcctggttatatcactgatgtactgagctctttagattctgtgaccacttaccagcaaggaaatatttgcgttatgtagatagagctgaacaaaatacaaaatgctcgttcgggcatgtaaataacatcattggttcacaaatgttcttttccattggaattctaaatctggtcggaatggtttacaaaatggctgatttgagttgaaaaaacttcagtaaacttcggtgaatcaacatctacaacacacacacacacacatatatattatatatgatatatcactgtaatatatattacataatacatgctactatgttatatattactaacacacacatatggaatatattctctagtatggaaaatgtaacatgagcataattggacaatagtagtgtaaaagcatattccctggttattaatgcaagacataagcaattagactttaggaattctggaagataggatacatatacattctatagttcattcctgatggaagttgtgtgttgaggatgagactagacatcacagaaggaaacacatgaaaaggtggtgcaatggaagcaagcatgagatgtttgcttgtgtgataaaagcaacaggtctaattcagtgacacatatggcagaacgtgatcctagaattgcctggaaagcttaaaaactgctaacacctcagccctgtctctacagccttctctttttcaatccaggattggaatctagctatgagctctccgtgttggtttattttgtttttcattccccgaagtgttttaatgtgaagtcagagtttgaataccatcactgtgcaaaataaaggaaactcttctaaaggcatacagtggacaaataaggaatgcggtctctgcttcatagaaatacccatgcatttatacatagacttccaaacagttagcagctatgatcctgtcttcttggttaacgcacccgaagcctcattttgccctttctgtgccttgtgtgctttgggtgtgtgccacatagtccatcccggtgaagtgtgggcaattggtagctcctacttgttttcattcaccaggatgtgcacagtcactccaaagggctttattgccatgcccactaagatccaaggtggtttttctatgataatctatagctctttttatttctccagttttaccaatagggaaatggatgttaatgacttgccctgggccatcgtgttggctgggacggaggtgacagagattagagtcctagcttctgaattctccatattgtattaggttcccaaagtgagtatgcctagcctcctgttagtgacagaagtctttgtttctaacagtgtcatttttttgcatgaatgaatttgtgttagcaacacatcagtaggtaaagattacaaacctccttaagctagcagcactgggatactatggttatcagctgccagaaggcagcctgacaatatcccatgaggctccagtcattactcaagtgatacttggtcatgcctacttatactcttgctgttggaattgaggactctggctgtattcttacgtgactccagtgcctcacaaacttgatgatctctcttgttgtttcttgaaaggatattaaccccttcatatacaaggaagagaaagaaatggaagaaagagaaatgggagagggagagaaataaagagcccatattcctataactgtacttttcgtttttattttatttattcttacatttttagattggtttatttcactttgtgtttatgagtgctgaatgtgtatacatgcaccacatgcctgcctggtttgaagaaggtttaggattccctggaattttaagttgccacatggatactaggaactgaatctatgtcctctgcaagagcagcaaatgaccttatccactgagccatctcctcaaccccgattttatttttaaattttttattcagtacattatatatgattatggcattttcaaataaactatgaatagtttcctccccccacatacctcccaactcctcccccaccttctaccctttggaacattccccccaatctgtgatctagattcacttcctgtgtgtcctattgctctcctccaactcatcctcagtacctctttgtgtcctctcttggtcttcttccttgtctcttaggctttatgctatttatacctatatataaagcctaagatggacagacaggcagatgaatacattacaaagtaggatcaacgtgcgaatgagaatgtgtggattattttttcccctattgaatttggttcatcttgtttcatatactcttttccagatccaacctatttctcacaaatttcatgatttccgttttcttttcagctgaataaaataccaatgtttatgtgcagaacattctctttatatatctactaacgggcacctaggttcattctacttccttgctcttgtgagtagagctttaacaactatggatatgcaattctctctgtgaagaatgtggagacctttgtgtatatgcccaggggcagtatagttgggtcacatgatagttatatttgtaatttttttagaaatcttcaaatcgatttgcacacccaccagaaataaatcaagttctttttccccagcacggtatttgttgttaagcttcctgatgacagacattctgacataggtagatgatgagatgttatctaaaagtagttttgtctgtttgagacagggtctgactatgtagccctggctggccttgaactcacagagacctgcttggccctgcctcgtgaatactgagattaaaggcatgttccaccattcccaacacaaattagttttagtctgcatttccctaatgggctaatgatatcaaacacttttttttttctgtgacagggtttctctgtgtagccctggctgtcctggaactcactctgtagaccaggctgtcctcgaactcagaaatctgcttgcctctgcctcccaagtgctgggattaaaggtgtgcaccaccactgcccagctgatatcaaacacttttttaaaagtacgaattagccatttgtgtttcttcttttgagaatggtctgctaatgttcttagcctccttgttggctggcaggtcatggggggggtttctttattttatgtgtatatagtgttcagttttacagaacgtttaaattctagatattagtctcttgacaaagtttctctctcattccacaggctgtttgtttgttcttcaagctgcactcaaaaaaaaaaaaaaaaaaaagagtaccttttatgagttagtcctttgccaatggtgagactggcattttttctaaaggatgttagaaaaaggccagcctgtcacaagaagtatggcagactctttaaggcaaggaggcaggtcagttcacatcagcctcaaatgcttctctttttttctatctccaaatccattactacgtaagaacaactgccaaaatctttagccatggcaaaaagcaagctctaacccagtggttcgcaacactgattgcacaggaagatcaccttgggagccttaaaagttacttgtaggcccattgagtaggattctgggaatggggcctgagagtctgcgtttatttatagttctccacgtgaggatgacatgcattcctgagaattgcttctcagcaatcaccgaaaccttaattgcttgtatctgtgtcttttattgcttgttttaagtcacatgactgagaaatccaaaccaccctttcctgtggcgatttcattattctacatttaaacttgtgtgaatatatatatattagttgtcagggtgtggttttcaacataatattagattttctccctttttaagcagactccaacctcagagtcatcccaaatgacctcatgatgaaaagttcttatatataatttgaaagccagatgccagaaggttaataattatgagatggaaatataaaggttgagcttgcctgctacccatgtattgaatttctcaattgctgtgttgatctttagttgctttcatgtcattatcaggtcaattagttccattcttagcatactcacacccttattaaaagtacaatgacagtgatagtttccaaagactgtcatggacagtttttaccaagttaatttggccaagaactaactaggttgtataatgatgtttcagacctgggaaggaaaaaaaaaaaaatcactggactttgagagacttcctgcaacggtctaggcaggaaacaaaaatgaaaatttgtttggaaatagtcaatttcaaatctccctctatatatccaagactttgggatgcagagaataatcctaagaccaattatccacactctagctgagtctgagacgccaacccttctcaagaagttgtgttaatgtaaacaggtatccaatggctttaggttagacttgacaggagagtgcaaagataagaatggtgagctgttctcatcacccctggggttctgagcttgcacggttagtagaaaacacagacactgctaaagaggtctcggggagaccgatggacagagctctgttgcttacggagcagtgggaacatctgacagttttgtctcattcactttccatttggacaggttctacaggcccatggttagagccagagatggagtaatggtatttaggggggcggggaatttatactccagtgataaaacaacttagatctgcatttaaaaatcacaaaagaaggtaatgctaagaagaaaaagaagacgaagtacaggaactagaggcttaggagtttcacttgaaacaggtctacatgagttgccctctcttaggatatgtattctaattatcagaccaaggccaagaagaaaaccatataaatatctgagagaaaaatgactccaggaagagggaatatcaagagtctggcgagtatgagcaaaagaaaggaggctaacgtgagtggactccacgggctgagacaggtgtaggaagaggaacagggtctgaggtcatggggcaggcttaggattattaattgctctgaagggatcactgggagatttccaggcagagggagaatgggatttaaaataaagttttaacatcattgtggtgatggactgtgaaccagatgcaaaaggaccatagactgttgatatacaagccactgagagaataggttggcttcagtggcagtggtagagaagaggggttgtcagattgactgtacagttttggaagttggaatagcataacttccaaatggccaggctgtcttaacaaacctaactctgtctcatatagctgttcccaccctagcccaactaggaccattgggattgcactagatccagtagcatggagtattacttagcaacactagtaatttggggcttctcttcttcaaccacaaaaaactaaattccatccaaggagaagtctctgtttgctgcttgttaccttctgactgtcaaaattctatcctgtgtcaagaccaatctcatagggtttgtggttttgattatggtgtttctggtatgtgctggagtggtcacattcagatagttttttctgagtattttgacagtggttgtatttaccaactcctcgactatgcagttggtcagtgcctccatataaatgctaacattgagatggcaagtgcttaaggagccctttctatctgaatgttctttgcatgccatgttttaattaattcagtcatcttattcattcttatgataattgggtattcttgatgtggtcttacagatgaggaaatgagatgtagtaaaagacatttagtcatttgcccaagttcccatagctgccaagtgacaaagctaggcttggtactgaacctgattataaagctctgggtctcagccactatgctgtgccccttgcactcggttctccttcattttttccttcgcatgtgaagctgtcaccaaagcacgacttcttccttcaggatgcattccacctggcagggcttgaagatattggacaggacggctcctctccaagacgactcccatctaacacacctaccatccacccagacagaagcacactccttcacctagggctggacacagttgccaacaccaagggcctcttgctacatactcttcttgttctcaagttcctccttcccatccctcatagctcctgcgttgtgcccaccttccacctcaggcaggtttccttggtctgaaaaggcaaaaattacctataagccatgcaaagtggtctagttactccctagggctcaagaaacttaaaaacaacaacaataacaacaaaagtcattaattttgtggtcatcacaatatttgtttttaaaatagtggaggttttcctccagagtttcattaggagacataaagcaagcccaaggaccatgatggtttccctctgttttcttaaccttcccctctacatttgctgctggtgaattcttctctcagaggacctgacttcccaataaacggcatgaaagcagcagacctttccctcctcctggtaatgataataagaatggatttgtagaactgagagttatacaaaaaaatcgattaagatctccttagtctacataataaactcttcagcagtgactgcaaggtagtaactgtgatgactcatgatgctgtaagtaaactcgataaatatttcaattaaaaagtgataacaatcttttgtcctgctataaccaccatagggtaattttttatagagactgataggcattactgggagtgtgatcgttaatcaaatcattcatttgtttgtttgatttttcaataaaagtgttattaaaatgtcatataacacatatcacatatttctcctaatttaattaactcccagattcaaaactgcaaaagaaaagggaaagtatgtttttcattaagttttgaaggtttccctggcagaatcaattaattaaatgttaaaaaccatttcaaatatttgaaaattctccaaaatactacaaaagcctaatttaaaaacaaattcaacttaaagtcatgaagttctttctttattggaacactgtatatcaagtgtagctatgccctcaggtaacaccaagtcattcagggatcagagcaacatgacagctatgagaggttcacagaattcattgcatcgccttgctcagcatttgacaggatgtgtctggtgtttcttttagtaacttctgatttgaccttccagataacttcctagacatcataccagtgttcttacctgtgacttttaaatttttagttttctcctgtcttaaactaatggggcaaaaaaaaaaaatatgcatgaaaattgtctttaattcttactctccagcctttgcaaaaatttcaaaaaattcatgtgtgagattatgaatcaaatcctcttttaagccatcccacttccaatatattataactccatgaagccaaagcccatggtttacactaactactaccagttctaactcatcaccgtactggaatttcccttctaaacataaatatattatttagtgtggttatttgaagatcaactgaagtattttcaaagaagtacagtggaagtaatgaaacaaaatgggaagcccacctctaccttggtggccatgattatcaacagtaggtctacaaaaattccaagaggatttgttgagtcctgagatctaaacctgctaagaatcatattcagagactttaaattattattatttctatttgcttttggttttgaaactggcatatgaatccattttcagagggctagtggtagatgtccctgtcatggtgagccttgggccatcacatactttgaaattccatagtagaaaagtgccacatggatcgtagatgcagaatgctgggtagagctgaaaaatcagtcattagaattacctacttgttaatacatggaagaaggattagagaaggcaaactctgccctgaagggaaatcttaaaatgttttgtttgcattggtagtgcattctcattatctttatctatgactttatgtcaatcatatgctccttggctggcacgatgacaacattataagatacccaagaccaagattgtcatagtttctcctttatgcactatctgagaacccaccatttccttagagttccaatgctcattaagggtacaacttaataaacattgcaaaccaccacaagtcccagacaactaggaagccaatagttgtccctgtaactggaagagatgaaaattgacagtacaggtctagagtctaagattctaaggcagaaaactatcattcctgttgacctccatctcaagttatacagggctgtcaaacactaatgaccagttgattgtatgcatatcttttgtaagaattgctttgggttttataccaagcctgggggatgaatttacctgtttatcccaacccctttctgctattaatattctctagtctaaaaagaatttcttttttcttctattcaccccactgggacagccccagatgctcctaagtcctctttgattagcgttcctcacagctgtctgcattcctctttaaagtgctccacctctgaactgaatgttcctaaaaatgttccccgccccccccccccaaaaagacctataaaccaaacatggcaagaaagaaatgctcccggagttttcatataccctgcaggggaactacctaaaatagggtaggggagggtttcctagcagttataaggggagacatgttagaataagtgaaaattcccatcattccttgcagttccttctcagctgaccctattaaatacagttgtgataaagtcttcttgagatccaactaagttttaaaaagtaagccctcaatatcagaacctttattgctaattctgactaccacagacttaggcttttccaaagactcagaaccagctgtgaacgatagactcctttgcgcaattgcaagagagaccattggctagaatcaagcatatctttagcagcaataaatgttaagggatgacgttatggaacacgttagtgatgtatggaaatatttctaaatttccttggaaccttgggctcatcgtttgtgaaaagtgaacaagcctacacttgtataccagaacaattttgagggtgctgtaatctccaatcttacttttctgttattggtgctccatgagagccccaatagttttagctgtttgctgtacatttgaagaaagaccctgaaatggtgctgtggccagtagtttgttggttcggtgctttgtccactgagccactgatggcacactttcaaggccattgttcttgctaaatatttatctggagaactacattatgaatctttagagtccaaatctgataactgtgcaggaaaactcctcgggagagatgggctagaagattacctcagtataacatctccatttgccctacatttgattccagcaggcaaatcagagctcgttaggcagtgtataattcccagaaaattgaaggcagaagcacctgtccttcctctggtaaagccaaggcaaatgcaaaatctcagaaatacagcagcaccactggcaacaggcacagttgagaaggctgggaaaagctcatggctggtgaaagcaaagctggccactggagtgggagagcctgttagaccggtcttagaccggacaaaggcctgagtggccaaaggcaaggctgtgcttatggaaactgagcctggggcggtgggaactgaaaactaacccataactcaacaaagcaaaactgtttccatttgtgggagatggaatgatatggggtttgtgactcactaaaccagaaggccaaacgactatgaagagagaaacttagattcctctggccacttggagaggccctcagatgtgcatggtgcataccacaagctgaaggtggtcacacaaaaagaaacacgtttaggtgctggtcgctgtggtttatctttggttcgatttgcatgtaattccttaaacattaatgtgattgttgaaataattttaaaaaacttttattagtggaaaaagtatgtggcaagaatctaatagcaaaaaactacaagaaattaaaaatatagacagtagcagcactaataagagttaacgtattttttcactgttagggtggaactcaataatcacagtgaaggctttggaatcaaaggcagaagcctgagttataatgtccagggaatgtccagggttgtgaatttcttttagaatagtactttacacatggacttaggtagtcatcaactcaaagatggacttgtgcattctcaccacatagataaactacataaagctgtagcaaaagcatgtgcaaatgtaaaacaacttcctgtcacagtagtggttcatggaaaccgtcttggcaaagttgcctcgactaaactcttttcaacttaccttcctttagaagcaaaggacttctgatggagtgccattactgtataatgtgatagttagctctgattatgaaagtagctaagatgttattcagttatcaagcattaagcttctctaagaatctttcctcagtataagtaggcagcaagtgaatgtatccagtaaatagcaagcacacgctaagcatggaagggtgacactggctattactgatggcagtaaaagactaaatcccaaaggagtctcatactgctactgtgttttttcttttttcttctttccagtgtcagtggatcaaatccaagaagaccttatgtgcagtagacaaatactctaatcccaacttataccccctagacactgtcatggctattgtcccatcaatcttgacaggaaatttaactctttctacaggatttggtgtcttagaaagcatgaaggtattatagtagttttaatctcaaatgcacagctctctgccttctaattgataacaatctgtgatggatgaaccaggtagggttagaaagtagctcgtcccctcttgtcctataatgatggcctctatactctgagcagtactagacaaagattctgggaattcttccatgagcaaatcttctttgagaatacatgccccattgtgtatattaggaacaagaatgccacaagagtgtagcagtttcttaaatccttttcctatgtaactatttgggcagtgcaactattgagactatcaaaaatgtgtacaaattaatcctgtgctaatgagctttactgtaaaaatctcataccaactgaaggaacgcatcatttctgaaggctggtttttaattattggtggataaagcatttctagagtaagaaagtatggagtgttgacctagataccagaagtcctgtattctaattccatcttattctatgtttctttgtatgagtgtcattcctcaataattcaacggttatgtttagatgggagacccagaagtggaaagagacaaagcaagccagaaaactcgctgacttgcttgttgcactgaacttcacaaagcatcattgacttcactaccaaatctgtaaagataagaggactagcaagtgggactgtcttcatacgattattcacaattactcctctgggcaacattctgcatctaccaagaggtgaaagctagagaatttctttcatcctgcttagcacggacataaaagagtaagagtgttctttatctgtcctagactggagtcattacattttgttaggaaaaaaataattgtattttagactttgtaggccatatggccttgattgctcaattctgccccttctgtgcaaaaataaccatgaacaatgcataagtgattgtgaatggctcttttctcaaaaataataagcagagcaagattactgtagtctgtttaaaattctctgaatcccaagtatgtacctgaattcatagcttgacttattgattcaaaattaagtctaatctattaatatttagtctataatcattgaatacatttctaccataaatgaccgtatttagatatttgtttaatctatttgtactgaatcaacattaacagattataaatctcttgtcacatgtggattttgagaagttttgtttgctctattacttttgtaatcaataacaaacataccttgacatagcaaggattttaagttaactctgctgactttcattttcataactctgattttaagaggctttacatcattgtagtattgaaaaatgatttatttaacccgaccttttctatctgtatatcagacacatcttatgatagctgtttctttgcctacggaatagttctaatctttctgatttgtccttaaataaccatacttgctcatctccatgcctctatcattgggtcacattagactttgtaagttcttgaattgtaacaactattctagaacactgtgatccaggctggtcataccaactcttcctactaatggacagaacctttgagaacagtaaacaacgaaaaagagagtcagaagtgtgaaaataaggtagaaattgagaaagcacaaaagaaatttgaagatgcaaaacgggctacatgaaaaaaggctttgtctcttgtaaaaaatgttccacactattagcctgttgataattcctttaaatttcagttgtgaccacagctttctagagtgtcaagaggagtcagaataaaagtaacatcctcctttgaagactaatgatcatgtattaattgagagtaaagatctctgcttatagtttgtctctgtcaaattgcatgccaagggtttatacaaaccacattccttctgtaggatgaggaaatctaggacatattttaacataatggaccaaataactctgttacccagatctgggaaattttactttgcactggtttctttcctctgccctcctgatccaggggggaaagttaacctgcattaaccagcctgggttatggaaggaattattctttcattgaaagtcatgtgcagaatttcaaaattatagtatatcatagtcgtcattgggaaatatcctgtgaaatgaataaatcaaacattaatcccacttgtagaaactctcccaggtactggagaaatatgagctgaggggtctcaatttatacagagtttatgaaatagtaaggaaacagatgtcaatcaaacactgtccctgaataaggatgtaactctattgtagggaacttgcctagagtatgcaagccccaccctcacacacacacacacacacacacacacacacacacacacacacacacagaggcatgcaaatcaaggacattattaagtctggttaggacgacgcaagcatggcatattattatctcagagagcaaacctaaaccagcgaagacagacccttcaaaaaagggaaagaatttgcgtagttacaggagaagcactttcaggggctctgaagtagagagagtgtgcacgtatgtgggatggaagagacagtgtggctgacccaagctgaaatcaatagtggaagattctggagaatgaaagcactgtcctgacactgaagccctgaagctacccaggaagcctgtagtgtgtgtacagtagaggcataacatgaaccagttaccagatacttgaaaaaacccctcacattgttctggataatattttgtgattgagattggattcctagggactatgagaaggatattagtaaggaaaatagatggcaagactgacatctgggggaggaggaggggggaggaggaagggggagcaggagcaggaggaagggagcaggagcagaagcaatatagattttgaagtgatataagcccattggaccactgtgccattggcatggttcctttgggatcatgcaaaaatgaatggtgtaccacatgcatcatttgactccccagagagcgtaaatattttggtatctctggcacctatttcagaggacagggaggaaagaggcttaactacactttgcttaggaagtctgtggatatggtcttccttgatgtttatgacccgttctatctaggcatctgaagccttcgtgtcctccaaaatgggccaattctgaacagcatgtgctgagtgttcttttgatctttgaaaccgagtttctggcttttgtctttgtttctgtcttaggctaccttcctacacattttgcctcagaataaagtctttaacctttgctttctcatgactgtttgattttatttggtactttcaggagaaggaagaaggtaattttatgtaagaatagaaatgctagctttccaacttttgacaaactatgtctctgaagtcagggaaccatcagaaggatggatttctatgtgggtttaaaattgagtggtttcttagcattatgggttatttacaaaaaaaaaaaaaaaaaaaaagccagcaccgctgattataccattcgcccagaaaaacatttacaacttacctaagatgcgatgtttttcttttttactaaaaaatttacttgcaaatgtgatgatctttttcttgcaggtgcattctgacatgggtttgggaacttagaaaagcatgtgcgtgtgtgcatgttgactattgcatttatatttgtgtgcatagacagacagacagccatacatacatggatatataaaatctcacatggattacttgattgggagtgtgttaaacctacagattagctataaaaactaatttaaatatctagtcagtccatcaggaaacagtgaatatctttctgtttacgagaatcttttgaaagcttaatcattttaagcttataggtcctgcctgcattatcttgttggaacattttatggatttttaatgttaatatttcattatagattaattccacatcttctccctggtactgtgatatatacatacatacatacatacatacataacacacacacatatatatgtgtgtgtgtgtgtgtgtatgcatgtgtataatgtatatatatatgtgtgtgcatgtatatatatacatatatatataacatgtataaaataatatatctacattaatttatacatatttactttctagctatccactggtcataaattatgtctcatcttaagaaattattttatggtatctgtaaataatgatttttctcagtccaattattgagtctaatttttatctggtatttagattatggatctaaatattaaatattaacaacaaagttttataacaataatattgactttcttttctaatgtaaacttcaataagaatgcttctggtggagcatttttaatgttttggagatattaatatgtcttgagtctgagctttgaagtaaagaaactaccttgactgacattagccacttgaatgtactttattggagacatgtcttctgtcattcggggtcagttatgacagccaaaactgtgtacacttgattcatgtctttttatttgtgtcccagtctttcccttttcctgtgtattttactacattcatagctactgttaagtatacaaagtatcctatgtttagcccatgcttatcaacctgaaggatgcctataggtttctccaacccacttctggatgaaatggtatcattaaatcattttatcaaggatcagaattttaatccattttcaatccccttctcaatatttaaaagagtattttaatttttcatttttgggtaactgtcagtgacttggagtttataagttattttagtgatcaagtaatgtattcattttgtacgttcctggataattgtgtgtttgctcaagttctgcatcttactttattaattttagttcttttcttagacagctaaagaacaacttggaacaaccaaagcatgagtggtcaaatgtctttttcatcttattgattagcttggaatgagttactgcttatgttaagtgtaaagagtaacctgcctgactggctggctatagaatgttggtctcttcatctgtcttcatttcttcgacccagggtctccctcactattgtacttggcctcacactcacttgagcctcctaagagctggtataacacacatgagtccactatatctggcttggccctttgccttaaattcagaataatctgagattgtccatagaagtgttctcatagggacttgctcaacttccaaaatgcttttgttttatttggacattattaaagcaaagatctttgtcccaatgtacctaggtatgagctcatttttattaattttgcatgacgttactgaatcgttcattttgcagactcgtatttttcattattttgcatgacactgctatatttgctttaattattaaaaatttctttaattggctactgcctccataattttatccctttcaaaacatgtcattaaaattcaagtacctcttttttctatagtgatagtttccatgtggtagacatgtgcatagagaggctctgcacatacaactgaatcggttttgttgaatagtgtgtcctagaggatccatatctctgtccggacagcaactatttccattcttccagaaagcttctctatatcctttcccaagcagttaccccgctgcaccaaccgctgacctgatccctagcactttagttagtttcgtctgttctaacaactctatcaatgggatcatacatgatgtgagagaagtcttaggctccttttcttctgccttgatgtgttttcatgttgctgcttacgttattccatctcacttggggatgagtagcaatcagtgaatataatacactttgtttttattctttgagattgtcatgcaatacatttgatcaatcctcccaagcatacacccctccctgactcacccaactctcaatcttctttgttgcttgaagcccatcagttccaattcatgctgccctttaccgggagtgaagccttccactgaaacatggtcaacctacctggggatgcacccttaaagaaaactgtgaggaagaagagatgctgaaattacactataatctcaaaaagtgaaaatagtattttaaaataggatttcacaaacgattctgagcttttgggctttttgttgaggactaactgataaaaatttatctgaaagcatgtgatagacataacattttagggggggaatgagataactaactctctatcttctgtcacctagagttggattccatgtctgcttcccttatccatgctttgattctgtctggcttgaacttacccaggtcttgtgtgtgttctcacctgggtgtgtcacctgggtgtgccactgccccactgtgtccagatgctattctttccttataatcacccagctcttagcatctttctaccccttcttctgcagcgaaccccaagctcgaagaagagggcatgtggtataaaaggtgtcatttaggactgagcatccctcagtctcttaggctctgcatgttaacccatgagagtttctgtgttaacaattgtcttatgcaaaaatagaggagcttctctaatgaggtttgagagatacactagtcaatacatagcaatgtgtcattaggagacagttaacactaaatattttattggaataatagtactatgctctctcttagggctcaagacatgtccagtcacaggtttgtggctcagataaaaacaatgtcaggtgtgggttccatcttatggagcaagtcttaaatacaatcagagtctggttactccccttactctcatttcacaagtgggcacatcactgctatggttctcaggatttacaacggggtgacagagattattaatattctactcctgtgctgtacatagcaccttctagaaccattaaagctctccaggaagcatgaagcttccaagtcagtaccatattagttctccatgttctatgtctcaggtatgtggagtcttcagtagtggagtcttagtgtcatgtttttaagggtcactaaaacctttgacaatagcctgtaatagattcactggccaacaataaaaataatgcattccagacaccaagactcttaattgtcagcctcctgtatctaatagggaatttatttttgtgagcacctgattctatatcctatagagttggttttatctcttactgccctgcatgaacatattaaaataattatttcatttattatataattttcaaactttattttaagctaccctttaacttgtccctttctctccaagaataccttccccgccattctcccttcttctaacagttaggggtcctttctcacagcactctgtatggtctgaagatgagaaacactttcctacaacagttggcagctgacgtcttagctctcccgttggtactttttccactgtctgtgctatttatttttcatgcttactcatccaggaatgaaaaaccaatctactaagatccaatatttgtgaacatttatcatgtgcaatgtgttcttgaacctgctcagtgtgtaccaagccctaagttttccagcccacagctggagggcagaatgacatgtcctagctcaatattagcttcgaagaggaatgccaatgatgtggctttctgcattgagatacaatcttctcttcctccagtgcttattttcctgcactcaaaatagacgactggagcatccgttgccttgggatgcttgatttgttggactcttctctccctacccaacctcccatccttatcatgtgaactttccagacacctgctcattgttccagtgcccagtctcctaatgttcagctgcactgttttctaaaggctcacatttgatatgggtctagaagaaattctgtttgaatatggtcttattaatcaaagagatagctggacactttagggaaaatgaagaatcatgttctaatttgaggaatcaagagcagttggcttcattcttttttacctgcagcaagtagtatgttggctaataattctgaccataagtcagcaccatggctaatgttatctgtgatacactttccacgttatgaactgactgtaaagttttggtattatctggaatttttcttctccctcctctgtactccatgtcttttaaggtagtcaaaatagggacttggttccagaaacctaataaatgtcttctgagatctttcccagttcaatgtctttattgttctacgtatttctctcatggatcttgaataaactcattttaaaatgtctaaatttgcatttagaacaaccaccattgtacttcatgaacacaaatatataacatagcatagcatagcataacatagcataacataacataacataacataacataacataacaacctctaagtttttagcttttttatgttctgaggggtgttttcttgactaattattggtatggagcacccaacccattgtgagccatgtcactcactcctgggctggtcttgggttttatgaagcagatggaggaaaccaccaagacaagccaatcagcagctgtccttcggctctgcttcagttccttcttccaggctcctgattcctcccttcccttcccttcccttcccttcccttcccttcccttcccttcccttcccttcccttcccttcccttcccttcccttcccttcccaagcatcccaaatactaacgatgtgtctttggcacatctctcagagcaaacccaactgcatatgctgtagacactcctaaagcctgcttttccaggaaaggggacccacatcatcatgagatttaaaatttagttgatcacttgtcctctcacctgtgtgttatgtactcacaattcaggatgctttccaacatgtgattcagacagcaaagtcaaagtatgatcttggggtgtgggtgagggcacagatttcctacctttgaccttcaaaatacacattgccttcagtaccacaaaagcattgccccacacaagtttctaagaactaactgtagccctccccccatgatgattttttccttatcactattactaaatattagcgcagtgttgttcccttcggcaacggctgtgaccctcaaaagagaaatcaatttaatttctcaatcttgacttgcaacatcaaggataccaaacaaagataaagatttgagaggaagaagctcaacaacctaccaaaagcacagcagtattgagcttttgataaatgctcaaagtcccctgtgctttctcccgagaagaaataaagaacattactatcaggaaaccatattaacaaagttagtcccacaaacactttgcttgagtgctggaatcttttctcccttcatctcgtcggtgtttgataaaccactagcaaagatgtgttgggctagcacagggcctgtatcaattacatgagccagtggccttttggtttatagacttctagccttggctgtttcacaatacaggtaggcagatgggtatcaagtccaataacctggtatgaaagaacaggatttaccttggtatattggtaccaaatgccacacagcaatgataccgcctatatttccctggccataaaagagagcttgtgtaatcttggctcccatctctctctctctctctctctctctctctctctctctctctctctctctctttccccaatctggtgggtcttgcatactcacttgagtaattacataatacttgattaattacatactcaagattatgttttaatgaataagacaacggctatggtcattattaacttctggcataatcaggtacttaattttacctcagaaacccattttgactacgggtcactaaggtctcaagctttctcaaatgagaatccatccagctgcagtccactacagcctctagagaaaggccatgcagtctctctaaaatgactatgctctcacaagggagaatttgaagcatcataggcaccaggtcgtcttggaactaatgttcctttcaaagctagttgaaagaaatgatcagctgagaccccttcctcccccaggagacctttgggaatagcatctcccaagaagacaactgaaagcacggagtgacagcatgctgtcatttcaagcccagcaatggggtcactatgcaggatgtcctcttttattacagaaggcagatgcgccattagcagagaaatttgtattgacattttcagggacacacaaaataattgccacttgaattttttttctatgctttcaaaggagtgtaggaatcgtcttcgactgcactgcatttatgacttcagtgaggggatctctgtggatgtgctgtgctgattcactttcagacagaagcttgcacatatttcttctcaactataaagcagatatgctcagtgttcttacaagatctagtgaaaatatcctcacttaatttgccagccattgtaaagagctgttacctgcctactctgtcttagataccacactaggcaaccgtgtacaaaaagggaacattctccccccttagtatggccacagtcaagtggaggatgcaggtgtgctgtagccataggcagaaggagaggtagtcagtaaatagcctagaagagaataaggagaacattcaaagggaggaagagaatacacaaatttaccgtggttcccatgtccctgacattttgggcagtttgttgcaaagagcctggtgggcagagcacatagaaagacaatgacagaagacagagtttggaatctattgcagtaagtccataatgacatggtcagttagcagagaactttctcccaggtctcttggttcaaaagctatgatttttttctttcctcaaaatacagtgggtttctcagtggaaataaaatatataaattacctccaagaagcaatcagtgggttcttttgatatctgcattttagaggtgaagaaacgcaagcataaagatgtaaatcaccttgtccaacattatgccgtgagatggatgatctcacgtagtcaggcttcaggggtctctagctctacctcaagattctacccttgatccagaagcatttacatagctgtctgtgtgacaaaaggatgccttctgcaataggcctagtaaatttccaggcttgaggtggtgagagcaaggaaaacggggaactgaccccagtcatagctccaagtggctttctctttacctgtttgtaactatgtttcttacagttttgttttgtttgcttgtgtgtgtgtgtgtgtttcagtaaaaagatcagagggaaatatcaaatatcttcctgtttcactcttgtctgacttattctgttgagacaggttctcagcgcaacctgaagctcatagcactgggctggctgactagtgtatttcatggatatctccttcagtgttggtattacggtcatgttcaagcatgtctgaattttacatgggtgtagggatttgaactcaggacttcatgcttgtaccagaaggacaaccccattcataactatctgatatctcacagttgaggtaaagaggtaaagtctctacatggaaatctgttagaaatgttatcaaagaatatccatggctttgacagagatctctgagatgctccaagggcttcatttgtatttactgtccaagacactaaaagttaaatttcataaatctcaaagagatatgtctgaaaagttttgattattttacttttgtttaaaatgtcatgtataaatggaaagttttgggggatacaggatgaaaccaagtcaggccaaacaaatcctgtacatgtttcaatatatccattaatagtaataattaatattaatattaatattaacagcatccaaacagcctggggtacattattttgttttatacaaccaaaggattagggtatcattttccctaggcatgtaaataataagcttacccttacaatgttgctcaaacactatggcttttcaagctacctaccctggttggaatcacttattgccaatcaatatttgttataagtttaacatcagagatgtggggggaggggaaggaggagtgatgtcaatgtagaggcccagaagattaggaattgccagagtgccagcgtttaaaaaaaaatagtaattaatgcactgcaactactaatcgaggtgattgtctcctattttcctagaattgcttaaacaatgtttggacagttaggtgaatatgctgctaaaagcagaccagaagtgcagccctaaaggtgcctgcaggtctaaggcaggtggggcactggggcccacagggggatctttgcgtacactgcctcatcccatatgaagagcatgttcagtttctcctgagagggtcagttgtcatcctcatgtttacttctgtgcctttgtagttttgatatatgttgaatgtctgaggagtgacaaagtaaactagcataagcagcgtttgacccaccccaccctgtttacacattagaagcatacacagggtatgcttcccaggatatgggcaaagtatccctatgatcatgtcctgtggaaagactgtgatccagagtctctcctcatatttctcatcctggtgcttgttggtcatggcccttctgaaagtctttctttttatatgtgaacatttggttccattctcattaaaataaaaagccaggtactgaataggccagagtgcaatgtgtaaacttctgcaggaaacttctgccctttgtttcgttgctctacactgtattgcttttgctccaagttccccttccctcacatgaatctcatattcaagaggcatgttaaagcacatagctgtgccacaatgttccaaggcccttaggtcacggcaacctaaagatccatacaacttacagttgatgaggcaaccactggtaaagtgtcccaatagtcaggcaagtttcagacagcgtgatgctggcaatactaacacgatagaagtagcaagataaatacaggtggatggtgaggaacgccttcgtaagtcgatttctgtctgagtcaaatggcaatgcccccaaaacgtttgcaaaatgagtctctatcttgttgcccaagggaggcagctgtgcaatctgtgataactgctgaattataaggagagttggttgtgttcttatttcaatgttaagaagcaagattattgtcccccaaacactattagaatgtctcaaagaagaaacccagttccctacttggatgtaatggaaactgagaaatttgtatctttctggtctttggctttccttgtttgctagacttgagagacagctacatgttttccaggtgaatgattttgggagatactcaggcatggcctcctatgtcaatagtttccttaggattacaaatgtttccaagccatcttggtacacaaatcaaataaacccattcaccaggacctgtctgttctccaaaccagtcatggccttatcgcttgcataaagcctcctttgtgggtactcaccaatctttcttttggcttagacagagacacatctgttcctactgccctaccccttttccctttcagtaccaagatgcctcaacagaagtcaactataccaactccagtttgaatccaatttttcccaagcacagagatgcacacacataactctagtatttaggaagctgaggatggagagttataagatcatagccaatctgggctacatagaaagaccttttcttagagaaataataatatcaaatttttacttgtctagctaattatcacccccacacataccttctcttcctcgggggcagctcaaatggcaccatagaggtgaacagttgagcttatagcttcctgtacttcatgtagctttgctgaaacatggatggaaagtttcagcccctcttccaagatagcaacctcttcagcaaagcacgtccttgtcaaagcacaaaagaaaaggtctacagagtgtagattttttttccttatacttacacatatacatacacacaaacacacacccactcagccacatctttgcagtacacttctaagggtcttcttacatattctactctcatagtaactctgggagtaaatgttattatgagcctcagttttccaagatgaagtatctaaagtaagaaaatgaagtgatatgagaaaggtcacatggctgtagagtgaaagatcaaagcttggctctaatgctctgagagatgccttggccatgccattggcttaccagtcccgtgaaggaaggagctccagtctacgagggaattccaactaaagtatgagtagcattacttattgagttcttggaacagtctatgttctatataccatcctttctagtagctgtctgtgcattatcattattttgaatattattttttattatgcccatttaaagaagaaagtaggatttaaggtgcctacgtgtcttactacaaattacaccacttgcaagagtataatgacttgataattcatgttcacatctcaatttaaacctatagaatttaattttggtagtgccacacagttaaaactgggtgggaagtaagtctttatggatagagtcttgtacaagaaaaaaatgatagttataaagtactctgcaaaggaaaaaaaaatctgttctaatttatctgcatggtcatggaaaactctgctcagcctttgtgttggtggcttcttatgaaactgtttctgctttgtttgctctgatatcttttagggatgatccagtcagaccagctatgcctagactctccgtaaatccagaagcactcttcaaaagcaccgtgccattgttagtgttaatattaaaattgcttccctagtctcctaacaatgttgaatccatgcttaaagactctgggtcccatacagtatccccagctaacaacctagtgtatttaagaaaggctttattaatagggaaaaaagcatctttaatattgggttattttcttgcagtaccagaattaattcaggggaatggaaagattgctttggatttcagaatactggttctttcagaggacgcaagatcaattcttaccacccgtgtcaagtggttcacatctttaattccaccttcagggtatcctaaggtctttagtagccttgttgggtacccacatgtacatggcagataccaacacatatgctgaacacatttaatgaaaatgactcccatggattcatgtttgagtgcttggtccccagttggtagaatcgtttaggcagattaggtggtgtgaccttgttggagatgtgacattgttggagcatgtgtgtcactggaattttgagattttagaagcctatgccaggccaggtctcatggtctctctgcctcctgactgccaataggtatgtaagctctcactactgctccagcgcaatgcttgcctgcctgttgctaatctttcctccatgacaatcttggtcagactaaccctctgaaactgtaagcaagcccccaattaaaaatgtcctttcatagctttcctggtcgtggtatttcatcatgagtttgtgactttctctcctgaaaacaaaagggaggggggaataaaggaggaggaaaggaagaaagagaaaagaaggcaaagaaaatatccaatctcatcaaatgagatgctttttttttttttttttagaaaaacagtatgtttaacagtaagtgtatttttaagaagcctttttttcattattggacaaagctatgtcggtcaagaaatcagatagaatctgtgctctaaaacattctatattctgagaatggcaagtaacactacttcaccctagagcaaacagataactgggtctggggaagcctgtggtccaggtataattgagtaactcttctgtccacagtcatgaataatgcaggaacccctacgtatcatgtgccaccttgctagtagataacataggacaaacatgttaaagatgttattgaaaagccctgtgatagtccagtcagatatctttaattccccattttacaagtcagagcatggtgctctggtggacatgctaaggttcccacctcttcttgtcattccatccattccttttgactgtgcagccagctaaggtgaccccttgtccagtgccatctttattctgtctgttatcagagcttgatagggcttcaaggaccctggccagccagaaaaatatattacgttttttaaaattcgcacacattttttgggctgaaatgggacaatcctaatgcttatttttcttaacaatttttaaagccattgttccgttcatatttacacatccttgtgtacgtgtctgtttgtgatggtggtcactaagtgcttgttaactttgaggctttagggtacggatttttaatctattgcgactggagaagcagcaaaatgtcataggagttgaaaaacataaatattaattttcagtctcttttagagatttgtaattgctctgtatttgaaaacttcttgtgttatataataagcagattttagaaaggtataaagggcaaaacatacacaggagactatattccctttcttttgaaggcaagttttatttaaaaaaaataaacaacattttttcatttcccctaaatttcatcttctttaaggttaatttgtggctaccaagtggtaccttgaaaatgctcctctgacaaccacaggagacagtgagggtcattgctcttcccacataatggtaccacaaggcagagcatcacatctgacgctctcaagaaccagcagctgactgccagccaaacgttttatctctttcacaatcacagccactttcacacacttatctggaactgaaaatgtcccacgattttacactgccttgctggggcaagggacagtcagcagaggctgcaccttgaggcagctgctctttccctccctatttccttgtgctaggaaggtcatcgccttggggtttggaacagcctcacctaggcagccttttaccagtggaggatgggcagcttagagccccttttctatgttttgttttattttgttttgtttagttttgttttgtttttttgtttttacattacctttccctttctctgagtaagaacttcctagccagcttttcctgtggccatctctggaaaggcaagggaaacagcggctgggactgataacaactgtgcagctcctctgaacttagctgttgccctgggttgacaggagaaagggactggcccatggagacaatgagctgcttgtggggaggtctcaagcttcacgccatcagcaggtcgctgggcctcaccatgcttctccagagcctgtctcaggaaaggcatctgaaatactgtcagtgccgaacacgaatctcaaaaggtcaagtttatgttacaaaccagggaggcttccaccgtgcagtaccaaaaggacaaagacaagaagggagaaaatgggagcaaagaccaagtggaatggaacttaattgaaacaaaacaggaaactaaaaagatattccattcatcaaacaaagtattttctgtttagaggtctggtgtctcctccttaaccacacataacaataaatatattaagtggcttgtttactaaagagaagccatgaggtgaatggggccataaatttaaggtcctacatctgaggaaagacagtaggttctagaagaagagcctgctaagcccatgcaaggaaaaccatcatggctgccagctacacagaggaacttggaacagaggcaattctccatagagtcaagggcatcacataacagcatcctgtttgtttactttggcaagcacaagatgactttactaagtgataatctaaaaaggcccaaggtcagctgtgttagagtcaggaaaaggatatctttgaggggcgggcgggagggaggcttcttaatctctttctactcagcccttcgttcaaggggctcaggggatcttcaaaaaaaactggcagcattaccaacttgctaagagatactggtgctactgttctattatccgtgcatccgaaaagaggctacagggcattgtgaagtggataaaacttggccaaatagagaaatgctcccatcagcttctgcagaatgggcaagtagtgggagcaatctttccctctaagcaaccattgtgattgttgtcccttaaacttggcagacttggcactcaagtcattgcaggtctgtggaatgtcctcgaggaatgattgctgcagaacccaggtgtcaaacccaagtggcaaggaaagcctgccccttcccctgatggcactgtgtgccagtccacacacttaagtcacatgctctgaagggtgacttagtgggaagtttcccttagaaggagcctcagcctcaggccagggagtgttcccatgcagatagcaccccctcagttggctggcttatcttcagctccctccaagattagacccttaggtccttctctcaagatcagagcagataggaacaggagactgaactgaacaatccaagaagtgagagaaacagctgagtcagctactcactagagccctaattaagggctcattcccagattaaagtaattgggccaacctggaaattagccccaaagagaggagttgaccatgtcattaatatttagagattaaaaaaataaaaataattaaaattaaaacatccaaaaacaaagattatactttcatacatttctaaggagcataaagtatcctgtatctcaggtaagtgggaagggccagccttacctcctcacccacttgagacttttgactgctcagcatggcatccattcaagtgattcacactgagtgaaaataaaataagccaaggcatcaaggtcagagtgaagtggtttctaagacctacacctctgtgttctttaaagagacatgtgtcccattactttacgttaaaatcctagacacacgctatcctctcagtgttaggagagtgacacaatgatgctaaatgatgttctgtgaatgggactaacatcctcataaaaggggcccagaaaatcctttcatctctgtctgcctctcaatgatacaagaagcccacagactgcattctgggagaaaacccagaggtcacagttctatgtctgtttgccttctcaacctttgataaaaacaattgctttctcccacatgtgactcctctatcaccaggcaaaccaggccacagtcaaaccagtttcacatttcaatgcaattttgtaatgccttccaattagggtaacaatgggagacaagacaaagggaagaacaagatttctctcaaatactagttaagataacacaccttggtggccagagccatagacagtcaaaggtattgggcatttctactctggttagaaagactcagttgagttcttgtgtttctctcaagaaaccagtgggtgtgttcagtatatcctccaaacatgcctgtctccctcagaaaagttggagccattctcccaatactgtgaagatttagtgtgccttggactcctctcatgggagaagagacagaagcaaaggttctgtccttcacactgccatctctgcccaactcagtcatgataatcctcaaggtgattagaagaaaaagagggactagtgacctctgaggaaagagtttggcaccagcaacgtgggggagactgttgtgatgttcagccgtctccctctctgagcgcatgcagctcctaccacagctaacctttacacctggtgctcgtgagacaaaggtaactgccacacctgtgcgaagcctggggcctagtgggcctagagtgagagcctccatcatagagggctgtctgcccaggaaagatgatgtcccctgggcccacttagccccctgggggatgggactatttttcttgctgacttcttttcctgtgaggaagaagtgctatgtgaaaagctaagggcacgtggaattgcttctgctcacggaagccatgttttggagaattccttctagaatccctactggcctgaaatacctcagaatttgactgtcctaaagaaccttcttccgctgtgcgagtctgggcaggcagaacattcaggagaaaccacagggaaacaggtctgtttttaaaatttccttttcatgctctgtttcccttttacctcctctcctgttctttccatatctactgtcattttgctacccagaaaacctagtgattcctcccagctgacagggctgagcttgtgtttccacggagtccaggttcatggcaggcctgttgaatatggccctggaatgacgtgctttcctgctctttatttatcagagcctatgactcatagggcctagtggactacgcttccaaaaagcattagtttttgttattttccagttagcatacaaactgtttcagaatgacagtctcagacagacagccaaacagacagacagagagataattttactttgtttaattttacccttgtccctcttcacccttcctgctaatcttccttcacacaaacaattcctcttctgtttccatgtcatatagatatgtacactccccccacacacacataccccacacacactcacacagaccccttttactttcatatcaaccattcttttctattggggaaggtagggtaggtatgccccacggtgagcacatagaagtcaggagatcactctccagagttctctcctgccaccctgtgggatccagggttcaaacctaggtcatcaggcctggaccaaagggcctcttaccactgacccatctcaccagccttattcaggttttttccccttcaatctgcatatgatagaaaacttgtagtatttcttgttcaaaatctggcttctttgatttatttgcctctctagttccatctagcatacaaactatttcagaatgacactcttaggtagatagatagatagatagatagatagatagatagatagatgcatacatacatacatacatacatacatacatacatagatacagatagacagagacatttcattttctacacttaaatacatctctgctatgtctatgcaccacatttgctctattcagtcatctgctaatagacacccatgctggttccatatccctactactataaatagtgctacatgaacatgaatgtacaagtcatctgtctaaaatgctgcctcagattgcttcaggtatatacttaggaatggtacagtttggtcatatagtcattcttttttgtttctgatgaacctccatgctaacttctatatggctactctggttacatactctacagtagcgtatgaacatctgttcccctacatatctgctccagaacttattggatttttttttgaggttgttttcagccattgtgtatacagtgggatggaatctcagttctgtttgttggttggtctgttgtttagagacagggtcttccatagcttagtgtacagtatgtagactgtggaccaggctagtctcaaactctccctgatgttcctgcttatttttcctaattgttatgatcacacatgtatgccaacaaacctggcttcattgcagctttctgaagttttatttttagatttatttgttttatttttatatgtttgcctatatgtgtgtacatgtacatgtgtgggccacatatgtgtgtggtccttgcagaggtcagaagagggtgtcagatctcctggaactggagttacagatggttgtgaaccatatctgaaaactatacccgaatcttccacaagagtatgtatgctcataactgctaagacacctccacaacctcaatgtagcttcaatttacattttcctatggctaatgttcctatgaacaattttatattttatatgtatttattggctaattcacttcttttgagaactgccttttttaatttatctgtccattcattgattgactttgtcttttgtaattttgagtcagggttaaagtttttgaattctttctatattctagatatataaagattaatagttggcaggaatttttctcccaaagatcctgaacgttaatgctttccctcaaggttcactttagctgtcttgcttaaagcttgataaaaaaactaaagtcctttccaatcagacacgtgtgagcaagttttccctgagccacaagctgcagtgcaggaaactatctggatcaaaaacgtgttctcgtgatttccattaagggattgtctcttgttccctgtcccctaagcgagtgctgataacagtcctccataccttagcacgtaagtcaatcattaacaatgggctgtacttttcactgggttgtaaagaataagaagtcagagctacagaaatctcctttcttgaggtaggcagtggaaggaagagtgtcacttgcctgtaaacctcataaccaatatgtagcaggctgcagcccaacacgcaggggacgtgtccgaacagaggagagtcacaggtaaggaatacgggtccatttctgtttctctatccattctgattctctcttctcacctttccaatctgtggactaaaaatgaacagggtcaaggtgtgattacagtatcagtggtagaaagaggtttctatggactgacctgtgttttaacaagagatgggcattagatgttagttaattcacaatctccgtctgactccttcaagactgatttcttacaaacatctgacttcttcaagactcggagttccagagagaaaatgtatgtcagttacaggagcaaagatcagcgcaacagcagtggtcacatgacaggccagtccttggggaggataaagatgaattagtgtggacttgggaacatctccagatcctactcaaaggcaaaaggaggttagatggtaaatttgaaagaattgctacaaactgcgccaaaggaaaggaattatgcttatttctctttttttgacagactttgggggttttttggtgttttgtttggtttggtttggtttggtttggtttggtttggtttggtttggttggttgtttttttgcaatgatttgttttaaaataaatttgtcttctttagaaagcttccagatactcactttcctttctcaacgactttcttctgctattacatgtggcattcttgtgacacatttatgacgacgaaccaacgttagcatgctatctacttaagctcttacactatctacattaacattgagtatttgtctcagatatttttatgggttttaagaaatgcataatgacacatcactgacttgtacaaaatagtcccatgatcctaaaagtcccatgttctacctagttctctttccccactcccctaccaagcccctcaaaaccactcaccatttttcctgactccatggctttacccggtctaaagggtcgcctggttgcaatgaagtagaacgtggtcttttcggattggtttgaattagtagtgtgcttttgagttttttctgcatctttctgtggctcagtagcacatccctctttgtcgctgagtaacatatgactatgtgactaaactacagcaaatgtatccagttgggcaaatgttttagcatggtagaaagtggaaacgataaaggtggggggagtttagaaagtggcagtactataaacgtgatagaagcaagaagaacacgaagtagaaaaactagctagaaagctaaacacagatgcctcagttgaaataaaaatttttttaaaagctctggttctagggtggcgccagctcttttctaagcatatagattatgctgggagacacattaccttcaacccaagagcctacacatggtaggcaccccataacatttttgaagcccccaaactccaagactttttccaaaaagaggcttccccaagacaccagcttattggctcagaagccatatcagggaagctgtagctgcttggtcagatgagcctttgcatgccataggataagaaaatattcccttgataacctttgtttgaccgtggcttatggaagctatgagtataagcaaagaactcatgtttcaacctaatcacagaagtagcccaaacaatttccatgtaacaacaacaaaggctatgagaagatgagccagctatgccttcaaatgttcaccacattctagagcagagaacagtcatgtaccattatcagtagcccatgcaatgatgtaggagcccagtccaaggtgatgcagcttacagtatggctgtgtagttgtccagggaaactgatgggccagctggggcttgcagaacctaaagagacctgcaagtagcaatttgctaactcagtggggctaccatgcaaaaaaagctgatcacccaggctagtcaatgtattggttcaaaatcatcaactgcttaaaaccaggttctctgccagagcatagcattgctattccttaatgcccagattcctttcttactgtgtgatgaaatggggaattagccagacatgaagataggaccttgtgattcagagcttttcatgtcctctactaagttaacttacacactcagcacaggctaaaaaatacctgaggattttctacacaagacaaatctgggaactgctttgcccaaaggctattctgtagagtggagctcatccaaagacttacaacttactgcttgtctcggtttatgcttacacaacaagagggcttgaccatcattgtagacagtttagaatggatggtggatttggaggcatcggaataagcaatgtgtagctctctatcccactcaaagctcctggatgggaatacttgaagaaggagatgtctatgtgaagactgattctgtgagcacatctgccgacctagagatcttcaagccacagggcaatagaaacatctcaagcaacttccgtgtaatgagaaatgagcagaggagaatcagactctgattccaacacagcatcagctggggaagcagctgcctctatgcatcagcttctagccacttctgcttgtctggcttgtctctagagcatatcctgaacataaagtgcctgagacaggaacaagcagtacctaggctaaagccacaatgacacagaacttaccttgcttgtgcaaagcaccagactcactttcagaacctggggcaagtctagatccccaattttgaaaagcattttgatgatttcatatatctataggatggatttttttgtcattttcatgtgagcacatgtgtctcccccttctcctgctggaatttttctcaactggtgtcccatgttctctttttctgtgtgtatggtgccagataattgactccaaatttttctgggagaaatgtgcatctatatctcaagactttgttttcaaggaactaaccaaataggatgtccatcttacttccttgtttatttgtattttcttttatgtctagaagaaattagtcatgaaaaatctaagaccaagtccaacatttggtagtaggggagaggaagagaaggcaaggtactgtgtcctgggaatgtgactgattttccagacaaaccttctcgtcttcttgtccacattttctcgtgatttgtttcagaacccttcctgacctcactcttttgaccttatttcatgctcttctctccacctgcctgatagtactcagctgcagacacaggacacatttatgcatctctcatcagtatagggctcaggattatcccccaagggatatggcgtgggtgcaaagatgagagcacaaggcagagaatgtcacgagatggacacaatctcttccatagaagccctcatttttagggatattaaaggacagacactatggcagaaaattgtacaatgtccttggcattataaagttaaactctgggccctttgaccatccatatgttctctccatgtaggttaatcaaccacaaattatataacaggataggggttggaaatacaaaggtggatgaagtagcccttgttcccaaagagctaatgggtgagactggctcatgggtccatgatggtggcaaaaagtacggtgacctgggaccacatcacagaaacttgtaatgaggtcagctcaagaggccctgggatcacattgtgatatacgatagagctcctaagtaccaaactgaaagatgaagctgagaggaagatgtctgcggagagcattacactggaaagagaagccccagagagcagagaacagaagcacagaagtaatacagtggtagctggaagactgcaggtcaaataaaggaaattgtgatgtttgtcctggggagaagtgatacctgaaacagaaacagggctagcccctctggatggacttaagccatgcaagaagatagagactaaggaaaaccatcagagcattgcagatagatgaggcatgaagggagatttgcatttgaggaaggaaaagtctggatggaatgtgaagaatagtttaaaggagacaaaacagaagacttggaaaacacgtgggaggctgttgacatgaggtggcttagaaacagtgttcctaggaagtctcgttctacacctgtcacctcagggttcctgatgacccgtgagcaagactttctagaaagagccggttcattaatcacgtcacttctgtggtattaataaagcaactatcatggctttattttgtatcgacaacactatcatgtaaatattccttactgataagggccagtctccctcagcatttgtcagccactaggctcagggagccagctaccttgcatttcttcactgcctctgtaaagagaagttttctctttgattatgagtagatacacaactgccttgatgcttgttctagcacagcggaagaggataactaccagggaaactcgccaatcacaaggaaatccgagtgtttctctcgtaccccagtgttgtcagttaggtttcatttcaaagtcaagattgttcaagccaaagtacaattggttttaaatgctgtctttaaagaaggaatatgttagagaaaattgcttgacactcattagtgtgaagcatgagggcagcacttcatggctgtgactcagtctaaaaatttcatcatctctactagtttgccagggtggccatagcgaagcctagccaactgggggatctcaaatgacagaaagatattgcagttgggaggccaggaaacagaaatcaaggtgatcaaggtagcaaaagtggctgtcttctgaagtcagtgaggaagaatctgttccttgtctttctcttcactactaatgggaatcggttgcactccttggctcatagaacacccttgcctcttttttaatgctgacatggttctctctctctctctctctctctctctctctctctctctctctctctcccccctgtgtgtgtctgtgtctgtctgtctgtatctctgtctctatgcctctggctgtgtctgtctgtctttctgtctctctgtctctctgcctttctcactgtctctatttctctatttctgtctctctctgtctctctgtgtgtacgcatttgtgtgtgtgtgtgtctgtctctttatgtctttgtctctgtgtctccctttctccctgtctcttctgtctttatctctgtgattctgtctatctctggttctctctctctctctctctctctctctctctctctctctctctctctctgtgtgtgaggggagatttatctttgtcagtatgaacccatatgtctagaccgagccatcccattttaataagttagactgaagcaaagcccatcataatgggctcctctcagctgcgtccctctgcgatgaccttttttccaaataagatccaattctgagatgtcaagtgttcttatgtttcaacataagaatttgttgtacattgacagatacaattcagtccaaataccacctaatatgatttcaaaattaaataagttatcttctatttaaaaaaaataaaaccttgaagatcctccagtttctgagttcttcttctgtttctttcttgagagacttgaagttcttctcatacagatttttcacttctttggatagagttaccctaagatattttatattatttgtgaatattatgaagggtgttgtttccctaatttctttctcagcctgtttatcctttgcgtagatgaaagctactggttggtttgagttaattttatatccagccactttgctgaagttgtttatcagctggagaagctctcaggttgaatttctggagtcgtttatgtatactatcatatcatctccaaatagtgataccttgacttctttgccaatttgtatccacttgatctccttttgttgtcttatagttctagctagaactttgagtactatattgaatagatagggagagagtgggcagccttgtcttgtccctagttttagtgggattgcttcaagtatctctccatttaacttgatattggctattggtttgctgtgtattgcttttattatatttaagtatgaaccttgaatacctgatacttccaccacttttaacatgaaagggtgttgtattttgtcaaatgccttttcagcatccaataagatgtcgatgtgattttttttctttcagtttatttatatagtggattgtattaatggattttcatagtgaaacaaccttccatgcctgggatgaagcctacttgatcatggtgaatgtggttgatcgctttgatctgttcttggatttgttttgtaagaattttattgagtatttttgcctcaatgttcatagggaaattattctgaagttctctttttttggttgggtctttgtatagtttaggtattagagtaattttggcttcataaaatgaattaggcagtattcttaatgtttctattttatggaatagtttgaggagtgctggtattagctcttcttctgcactaaagccatctggccctgggctcttttattggggtggggggatttttaattacttctatttacttaggggatatgggtctctttagataatttacctgctcttgatttaactttggttcatgattctagttttgttgattcttttatctctttgtttctatttggttgactcagccctgagtttgactatttcctgtcatcaactcctttggggtgtgtttgcttctttgttgttgttgttgttctaggactttcaggtgtactgttatgttgctagaggagaatctgtccaatttctttaccagggcacttagtttttttcagcactgctttcattgtgtcccataagtttaggtatgctgtgtcatcattttcatagaattccaggaagtctttaatatctttctttatttcttccctgaccaagttaccattgagtagagagttgttcagtttccaggtgtatgtgggttttctgttgtttttgttgttactaaagtctatccttagtctgtggtgatctgatgggatgcatgggactatttcaatcttcttataaaggttgaggtttgttttgtgactaattatatggccaattttgaagagggttccatgaggtgctgagaagaaattgtattcttttgttttcgagtgaaatgttctgtatatatctgttaaatccatttggttcataacctctattaatttcattgtgtctctgtttagtttctgtttcagtgacctgtccattagtgagagtggagtgttgaagtctcccactattattgtgaggggttcaatgtatgttttgagctttagtaaagtttcttttatgaatgtgggtgccaggataggagagtatgatgagatacaactgattttcagttgtcactgagagtttgtagtttgggtgagctagggcaaaatctatgaagtgaaggcattatgtcctcctgaagaacccagagaatgagtttttcaacatttgagccttgttcctatgggcctggataggaccaccatagtgagtcttagaatgtcatttcaacgtgccctggatgggatgaacacatgctgcctaggggagtagctgacgtgcatcaaagtgtttactcgacccagatcacatcagaatcaacccttgtaaaaataaataaggtatgttgattttttgtgcagatggttaaacaaatctgatggggcaaaatgagttctaggaataagggatatcagagggcaaagctgctgaagatagcaagagctgcacctggacaattttggggcatagtccctggcagctgtgagtggctgttctaggggactgcagtgccaagagaagaatacttgcctgccaaagagagaagctgactcaagggggcaaagtcaagctgagctgaattctagggaaacgtagaagagcaatcatccagagaggggctctgatagagctccctggccactgtctgctcttttcagaagtctggactccctgacctccaaggcctcctcaaggtatggagttctctccctcttggatgtttctatctcctttcactgatgctcagggagacttgtgacttgagctggaaaatactgctctgggagggaagaacggtctgttgtcctaaagcagtgtgaccttggaaatgtagctaaacttttctggactcgatgtctttctttgttttctgagattcttggagttctggaaatcatgggctcttctgggtgaaatggatcttagaaacctagcccagttttgtggctgaagaaactaatgctgaattgagagatttcattattgtcaggaaactaatctattaaaggcagggtacataaaacttgaagatcttccttctcaccaagaaccaattccacaaaggcccttggtgtcagaagcctacatttgttcctcctgagaatcctctgaagtacagtcttctacctgcctcagacttgtgcaaactggtttccccaatggcttcctgctgctgaataaaaagtcagaaccttacatgtcagacacatttcctgccacctccatttaccctcctgcagttccctctttctaactggcttcaagctgagtagaagcaaggatctgattgttgtgagtgggcaggttcatcagagggtacagatagaccaacaaaaagacttattccaagcaatatccagtttcccaaaggaaactcctatccaatggatgaaagatattattatgtaaggattgttttatgatttgatatgaatttaaatgatccgttgtgaaatagaatgcagggatatggcagcacaggttggatgggagctaactggatgttctgcagtgattggattctcctggatcaatatcctcctcctcccgccctccctgtcttatctttggcttagagagccaggtgcatccaagtacaggattcctgatcagcatcagcacctctcaaaatctaagagaaaagttggctcctctgggtaaactgaagccttagcaaggtactgatgcctcctctgggtgactatgttacaccttccaaagtgatttggcttttatgtcccagttagatggtttggtgtcagcagcatattgtagcttacattgaggataagttaagttattggtcccaccccccacttttttttttttttttttttttttgaaacaaggtctctcactgaacctggaccaatttgccaagagtaccaaatcaagccataagcagtctcctgtttccgcatccccagccctaggatcaaaggcatgtgctactaacacctgggcttatagatggatgctgcagatgtagaactcaggtccttttgcttagtgcagcagacacattacagacaaatctgtctccccagccctcattttgttcattcaaatatcatccaaatttatctgtgatagtataaatgagtgagttgccattccccttctcacactaagcctttgaaattcaggatgaatttcatactaacagtgtgcccttcaataatacagatatatttccgatggagtctgctgccatccaggataacacatttgtgcaggaatatgtgctttgagccctgtggtgtctaaggtgtatctttcaacccagatctttgacgtgttagagagcagtgacatggttggagtcacgcattctgtttcagggattctgagcagaaacgagccaggaaatagtgaccgttccctggctaaccattcctccccagaagcatcaatgttccagtcccaggcagctttccagactgccctaatcccttgacatgcctccaatgctagttcccagcagtaagcatgtaagacacctgccttcccttggtagagttccagtgttaattattaacaaacaaatccacggtgcaccacagcaagatgtcactgtaaggctaccaagtttcctagaacatgtccaaaaggactttgttcccactgggttcctagtctgagtccagaccagtgtatacacaaacaatgggggtggtatttttattagaagaacttcaagctaccaatcctggagaacacacttggaagctttctctaggaaaatgtctgttcctatttgaccctcaaccagacaggtgtctgggaagaagaaaatcacactacctaagagggaactgcagtaaccatccatcacctctggcatatttatagataaattcacctattgtatgcagcaactgtaatggaggataagctttcaggagatttgatttactaatgacatagacacaaaggagtggcattcacacaccctggatattagagtggaggggatgtgggaactttgtcccattctagaatatgcatgaggcctctgaagtacagacaaggatggagcccagagtgcaaaactaacaagaagaggggcagattgcttcctacccaaggagagctggatatccaaagctcacttctgtaaagcctttctaggagttccttcaaattttgtttatgtgaaacaaagcttttcctaatgatgtaatgtggctttggcctaagtcacatcaaagtactgtcatcttaaactaggggttaattgtcgggtagttactatctgtatggccctggcacactcgacagctactccatttccgcaagtgcagagccctgtgactcactggggacgggcatgagcgttcttgccttactaggaagattgaataagcacagtcaaggtgcttagccatctattacagcagcaccataagtcctgcctttgttcaggtagcatcatggcctgaagacaggtccaggtagggtcattctcccaggcagagacaatatccaggtgtctatgtaatgatacgggtaccaggatcttgccaaatctgaccatcctagtccacccagactgttggtatggttttatcttctaacttaaaacaaatgctcttttggaggaaaaacttttaattagctgataatctgatgattatcaggacttcaatgtcatcaccagcactaaaagaccaaagtcttatgagcaagggcatacaaacatacatgtcttaggactcagtccatatagtcagatggccagttgttatctagattttaacactcttggcttacttgtctattacaaatactatggaattcaggtcatttggagactgccatctttcagttcagaaaaattattttgaaaatccttcagttcagaagaaattgaggttcttcaaaacccatgtttcttgctgtttgcagccactaattattccataaccctgaggttgcaacactgttcagtaatgggctgtgaacctaaaacaaagttatcatatgctaatatgaatgtctatggccaatcccaggccaagtaatccacttattccctgtggcttttcctccaatatcaatgcaagaggagtagggaacacacctgcatcctgaagaccctgtttgctatggcctggagctccttggacctggtgaaattaaatgaaaacaatatgatgatatcctctagagggagacctgggtctgaaatcaggatgctctctggtcataggaggcatggtgtgggcttgtaagcttgagtagaggacatgaagcttaagaccagggccttttattacaagccttttattggtgatgtacctctaacaaggtacatttggcaactaaaagtgtgtccagggaaaagctgctaagaatcagactgaggagcctagaaactctgaggagaagttagggtgcttcccccagagaaactggatgccaatctattgtttgaaagccagtcctatagaacaggtcttctttgttccaaataataaaaacaggagctaggtcaaggaaactgttgcaagttattctcttacttctacacgcatcatgcatgctgtcacacacacacacacacacacacacacacacacatatatatatatatatatatatatatatatatatatatatatatatatatatatgcacacacatgcatacacatacaaatgtgtatgtgcatgcacatgtacaaacaaatgaataaataggcaaataattgtaaagaaaatagttgaagtcagagcagtgaattgaatgaagattccaagacagagaccctgggtcctttaagctgcctgctctctaaggtgatgcttttcttggcatatgatggagaacaggggtaccagccatggaattgatggggcactaaagagcctgttagagagatgctaagaggctcatttgtggattttaagtgatgaacaaacaaagtgggtttatggttttggtgttctgcaaactgtgattttcgacttaggccatcccacatattaaaaataaaactaaaaataaaatcaggctccatgggctttacccatcccatcttagcatgtctgttattgttgtccttgctccattcacgtttagccaggcatgttggtgagcctttaagtacaacttctgaaattactagcaagcacaatctcacagcaaactccctgatcctctgcctctgacaatctttctgcctctcttccacaatgatccctgagccttgggtataggagtggtcttgtagattgggactgggatcctccatccatttggattggttgtggtttgctgggagggtttcactgtctgttgcatagaaaggtttcttcaatgaggggaaaactcaggggtgagcacgacacttctctgtgagtgtaaggactctagttaggaactatgccagcttagcaaagtgctgcttgcagtttctccatgacgtcactggcccttcctagttggctgggttcccaataccaggtgtgattttcctcttgtcaagtgggtcttaggtccaattagagaactgttggttactactaaggtatgtgtgccagtactactgaaccctttgtattaccatgacatattggttataatgataaccatatgtgttatatgtgtgtaatatacatgcaatatatatgctatttatgtgtagtatatatatatatttatgtgtattatatatatatttatgtgtttcacatatatgtatgtgtgagtgtatgtgtgtgtgtatgtgtgtgtgtgttccagttcatggctgtcatagacctactggctgcttctctcctttggaagcttgcatggtgcattctctaaccatgaaatctaatcctcaaggaacaggctttcaggtcaattcccgtttgggagcctctgtcactgcgtctgaactacttggtgtcttcagcattaagaacagaatgctaggaaggtgtgttgtaagtagtttgtggtattttgttttgttttgttttgttttgttgctaagccaatgggtcacaataagcagaatggtgatgtggctaagaacatgggctgtggaggctaaggccataaggttcaaatgccaagtcttctcttattggagtctgagaatgtggggcagttacataatttacttatgactgtgctttggtgtggagatagaaatgataatgtttgcccctgctgttatcactaggttttaatcacaactatctttgactcacaatgaacactcagtacatgctggaaatgattctcatagaaggaatattaccttttatttcttaagccaatgtgagaacttaaaaggcaccagcttgcaaacacagagactatgtctcttttgcattgtgttctaatgaaaggaaaattaaatgcacatacatttttattataattaggacacagttcaaaagtgataagccctgttggtctagggaatgactactcctatgacataaaggaaaatgaaatcaagtccagtatagatttttggccatgaagctcagagagtaagtaagatttctggaattcctatcattctatgtggctctatggcttattccccaagagaggcaaacaattaaggccctgtgcagaggtgcttccaccctggtgtacacagtgaagtagtaacagctgatggacgacctcattagccctcccctaagcctttctgtctcatcatgagtctcagctatgtgaccacgggaaacaggagagaaaaagatacaatggggaccacgtgtctctccttaagtactgcttatgatattgaggttgggggtctctgagccatttattcctcctctggttctttggaccacttgggcattggactctacacccctggcagatcaaggcacattctgtggctcttgggagccttcctgatcctatatggaatgacttagatcaatgggaggacagcagcagactcctgcagtcagtcaaagtggtttccactcctaggaggaacacaccagtttgtttctgtgtgaaatacagaaatatgacagctttgtcgcaacgctaagcaaaccattgtgtggcagaacaagcttctttttcacgtcagaggttgacacactggccccacagacaacaccaactgttccctttggaaacagaatggtggcaagaatgagcagttatgtggacatcatcattctggatcatctctaagatcaacattattttagaatgctgacaatgatatgttttgtgggcatgctccaggggaggattcagtacatggaaaatacatgctaatcatccacacataactgagggaatcataaagagtggatgatgccctgagggaatgtgtattatttacagagatatctccatgtcaagacccaatgcatcagatccatgggaaatcggcaaagccttctctggtctgagtatgactgttgacagtgtgtgcaagcacgggtgttcactaacaatttaccagtttgtgcaaaagctagcaactgcagcttcctccctgcaggtgtgtactgcctgagatagctcaaccttctttggagactagctaaccaaccccctgtctcgtagataacaaaaccccttacgtttcagactgcctcagtaactgatctcctccatgcaaagaagcatagcccatccaaacgcagctacacgtgtctgtgtctgtcctttcttcattccctcactgctcagtcaggtcacctccaagctgcacatggaacacagaacatccccatcaccttgggcccaagcgtctggcatatgcttccaatcttcaagttttgagtggagagaaaatgtgggctggaatctacaaatgtgagctggaagccattcctcatgataaccctcgctctttcttgcctttttcttttctgtgttttttttcttcatttattgcttatgacactagcaacgcaacctattggaataaaaatgtgtgcttcccagaacattgtctaacttacttctcaaagaaagggaccatttctgttgatagtaagacttggcttgaaagggccagttaaccctggccccagtttgtcttgatcaacatctctaaggcgtcctatatttgatctagcacctacagaaagagtagctacgctcagaagaaaaaaatatctctacaaaagattcacttgtatgaaatattttatacactaatctagctgaatcggtctctttctggtagaaaatacagtatccaaatatatagggagtaattatgataggtaagcctgataaagaagacctcagatcatgtgtgaccagataagcctagcaattgtctgaagacttcaaactaccccttaggactactgaaaggatgcctgaagaaaaacatctagaaacaagttttgtgtggaccaaacaaggagcaacagagaatttttgcacacagggagtctatgtaactgccccagtcatttctcctaaatctttttctgctagaaagacctttggtctggtcccactcatcattttaaaaagacttacaggattgaaatgattttagcctcttctttcttccttctttacagaaatgagttctgagacgagaagacttgggtggttaagtctgatgctgttaaatatatcaggggttgaaaagggcttagaagtgtaacattcagctgggcatggtggcacacgcctttaatcccagcactccggggggcagaagcaggcagatttctgagttcgaggccagcctggtctacaaagtgagttctaggacagccagggctatacagagaaaccctgtctcgaaaaaccaaaaagaacccaaacaaacaaacaaacaaacaaaaatgtaacattctgattgatggcatgtcccttgaaatgtttctgagctttactatgcattaaataacttgaaatgaatgcaagcatgcacagtgcttctttctgtcttactgaatttaaggatgccaaacaattctctcatttttcctttgctggaaggtgtggctcaccattctattagacaaaattgtagctgacctctaatacctaattagtgcaaaacaatgctacaattattgggcatgactttgacacgttttggctgctaatgcaaccactcctagttaaatagattggcaatgaagtttcaatgcaaactttgtcaatgaggccagcctactactagatatccaaccatatagacaggtaatggctgaacagatcttcattcctacaaaacctcaagaattatccattttgcaacttaagtatatgctgttcattacttttgtacaagcttgctctctctctctccctccaccccccccctctctctctctctctctctctcgtgtgtgtgtgtgtgtgtgtgtgtgttttaatggcttacgaatccacataggattcttgtacatattcattttggttatttattcccccttaattaatcccccttcatctccatgtctctccctgccctgctggacctaaccctcttctttgctatattctcttacccactgtccttcttttacatctttatttcaatcatgtggacccgtttctcattacctaggctttatccatactcacttctacttagagacacatgtttaacagtgaaaggataagattgccatctgaaaaagggtgtggggatatggcgtgtttatttttctgagtctaatttcttgagttctttgtatatattggacattagccctctatcagatgtaggattggtaacaatcttttcccaatctgttggttgtcattttgtcctatgacagtgtcctttgccttacagaagctttgcaattttatgaagtcctgtttgtcaattattgatcttagagcataaggcatttatgtgcatgtgtttgtgtgtatgtgtttggaagcaatgcttctcccatttcttggagacttttttttttttttggagagcagttgcctagatgttcatcagcaggtgaatagaaaatgtggtgcatacctacagtaggatttattcaacaataaagataagcaaaattacaaattttataggaaaattgatggaacatctctctctgtctctgtctctctctctctctccctggtggtgggcatataaaatgcagtagccacttcagaaaacggtctgacagacatcactcaagagcctcagacaaaaggttgtcatgtgagcaagggagtccactattgcctatatatttctctacgttggtaacagatatagtatgtaaaagtgtttgtagcagtactataacactatgcataggtaaaaaacagctcaatgtctatcaacaaataaggaaaaaaaatgtgctaagtaatatgatggaatagtactcaactgcagaaaagaatgaagtagatgacatagtgatgcagtgtagaacacagataaggatcaacagtattatgctaggctaaaagtcacttatttgttgtctataggatagaacctgaataggtaaatccaaagagagaaatgctagagtagtgtttccaggggctgagagaagactaaactgagtgtagatggattatatgtcttctgctgctgctccttccatgtctggctgacgacagatgttttgacaatggatgagaagctgatgaataatttttttaaaaaaatactgaactttacgttttaaaagggtaactgttatatgagtactctcaattttaaaggaaaaaaagcaatgtttaaaagtgggccaatgttggaagtcaactgtgagaagttaagagcagattcacaaataagcactggaattgggccttgatttgggggaatattaagaatataactagaagacgttgtaagaaaagtttggatgagtcagaaaatagggagaccggctagagagatgtctcagtgtttaagagcactgattgttcttccaaaggtcctgagttcaaggtcccagcaaccacatggtgcctcacgaccatctgtaatgagaaccaatgccctcttctggtgtttctgaaaagagtgacagtgtacttgcataaaataaataaataaataaatctatttaagaaaatagggggacaattgtgtgttagcaaaatacagtagagactagactaaggttcattaaaacacaggccaataaagatgaggccacatgtatgtgttcaggacacatatactgtaatacgtaaaatacattaaaaagttcagacttcttcaggctcgtgaaaaacacactgtgaatgctttaaccctcattgtctgatcgtaacccattcctagtcatctccctttcctttccagctagtttgcatcttacgtccgcgtgtgtacatgtgcagcttctatataggccgccacagctgattcctgtttgtccttttcccaattttttatttggtattttcttcatttacatttcaaatactatcccgaaagtcccctgtacccttccctccccctcctctacccatctactcccacttcttggccctggtgttcacctgtactggggcatataaagtttgcaagaccaaggggcctctcttcccaatgatggccaactaggccatcttctgctgcatatgcagctagtacttggatggaaggccacaactgactcttaaagactgtatgtaacaccaaatattagagcaattgtcttcacttagtagcatttctgagggtttaagtccctttcatttggattctcagtttccatgtgcaatgaatttttttacaggtgagcaagaaaagtatggaaggaagcctaagaaaggccgcaatgagactttaaaaaatgatgccaattttagaacgcatcttctctttcagacttggaaaattaacttttattactgccctatgcaaactaaatttaaaataagctttggattataccccgtgcgtatgagcggacgttatgacattgattgacaacgtcagatctaccctcaaccctctgagagtatgattcacacatacctgggatcagaaaagaagtgttttccagactaggcaagtcactagagctctggtggtactcagggtagatttcttccccataattcctagctaaagatgaaagatacagacaaatgacccatcctaggagaatttacaagggtagtggtaagcaggtaggtttcagaacagctcatgaaacaattctgcagcaggagtcaaggagtcccaaagaagtggcctatatgggacagcaaggagagactcaaaaaaaaaaaaaaaggaggaaaaaaaaaccctatgtggggctcagcagtgaagagcactgagtgctctttcagagatcctgagttcaattcccagcaaccacatggtggctcacaaccatctgtaatgagatctgatgccctcttctggtgtgtctgaagacagctacagtatactcatatacataaatcttttaaaaaaaaagtcctatgtaaaaggcataatggtagatgttgcaagaaagcagtgtgtgtattggtatctggcaggaggctcaggaatgttcacatcacagtcgttaggaaaggaaagcaagggaccccttattgtaggatatatggacaatttaatcatggggtttttttcccccaataataaaattttcagcaggaaaaaaaaataacagtaaacagtaagctacgtgtaacataaggatgaaagatttcaaaacccgtcttttacaaaatgcacagcaacagcttcttttgtgacagcatcatcagtccccgtggtttgcagccggatgtaacaagcccttttgaagagctaagagggcagaaagtttctgttgccaaatatataagagaagcaggaagcacttagcctcggaccaggaagggcatccttgcaggagaccctgcaggtctgtgcagttcattgcccaatgcttcccttaaataaagagccacagacttcaggagtgtgttcccccctgagtgattctgcaagagttgtttgccctccagcactgggctgtgctgaaagagtttagtttcccagggaacaagatctgggtctaaggcaaggcaagcagcatcctatgcccaaaccagtaactccgttttctcagcctgccaatcacattggagcttccagaccatcagtagctgggggggggggggggggggggggaaggcctcaagtctccagtccccatcatgatagtgagacccagaggaaagggaacacctgttgccaccattttgaagggacagtggtgacccataaagagggtgctctaaaggagacaggacaattcaaggacttggataaaatatcaaactgacagtggtgagcaactgtcaggttctaggaccagtttaatcctgactgggcagaggataggggccatccacacaacccctggagggagcgttctatagaaccggctgccttggtcagcttagggcaaccagcattaaggcagcaggaggagggatataacccaggctcacctctcccaacccctacacagggttccttcctgccaaggctctctacacctttagtttacagtggaaatcagaaggcagtaggactcaggtgcagaccatataattcagaacaggaaacaggaaatgtggaagaaggaggggctaagggagagcacaaacattggccagctgcagcccggccccaattgggactgcagacttgggtagatggatggttgccacatcctgctctgagccttttgagtgactctgagatagagcgcctctgtggagttccacagagcaggcacacaggctgaaatcatgaggtttgtattttacctccttgccggtttgcaagtcttgaaagctcactcctctaagctgatggcagccctcatgcaaagcaatctgattgctgtgtctggggttcaatacacacacacacacacacacacacacacacacacacactcaggtgcacgtgcatacacacaaagacagaacagtttgcttgcaacattgtcatagcttagtgaacagtatagcattgttctggctcaagaagccctggttcttcaaagctcctacttagatgaaattatttgcatcacaaacaaaaattgttttgcattttttagataatgaaggatcgtttaaatatataaattaagggctatttagaaaaaataggtgtctttgtgagactggcttaattcacttaccatgatcatattcagttatggtcattttaaatacaaatcatgtgtgttccaatgacgtgagattacagtgaactatctagggaaactaacaggagtggagtagggacaggagaggaagagaaacgatgggtgatgggcacatatgctcaaaaccataatgtactggggctggagagatagctcagcggttaagagcactgactgctcttccagaggttctgagttcaattcccagcaaacacatggtggcccacaaccatctgtaatgggatcggatgcccgcttctggtgtgtctgaagacagtgacagtgtactcacatacataaaataaatgcatctttttttaaaaaatcattatatacttgcatggaaatgaccctatgtaaccgagtttcatttagttgtttttcaattgttagagaaagactaaattttctctaagatagccatatgaagacagttgatcactctatgtcccagaagcccatctggaacttagcattttgagcaaaccataaatttgatgaaatacctcctattcaaggcggcaagcattcatttgcctcacatttctaagtctgcccctgtgactgccttagctccttcttcccaaattctccagttacctggcccttaggggtggtagcgaaatctccttcctgacagcttccttggccaggtgcttctgtgtggagtcagtgcccaggccgccagctgttcaagtgtttgggcatatgcacacacaggaacgacttgggcaacaccctttgccttgtttcgggatgttcttcttgcagacccttgcccagacatagggagtgcctgtgaagtgctccagaataaatcggaatgtcccactgaagccagacaccgtggtcttcatgttaatgtgtaagtagagtagtgatcatttatttattctttgattcccttttgcagagtttttattgccctgtctgagatattggagttttctgctacagtaaatttagcaggatttctccaaggtgactttagcgccagtgaaggacttattgtgcctcttcaagtggttctatcactctgcttgtgctaggggtaaaatgaggtgccaggtggattcaggacaagcagacacaagcaagctaggaaacctggcactcgatcccctctgcggtgcttaggcaagccttctcggctactgaattttgaactttcacaagaacagatcggctgtttgttcaatggtttattactcctgccacaacaacgcatggcatgaggttggcgcggcctgtttatttctttgtgtatatggatatgtgtttgtgggtgtacatgaatgggtggtatgtgtacacacgtgtgcatggggagacatgcccagggctatttaaatcttctgcccttttccttcacttccctcctgttccttcttaagaacaagcattgcttcaccttttcacttaaatttctcctctagaaaaaactgttatcattcaactcaacatgttttccactgaaacttcttccatattaatttttaggttttcatgttctcgttttattcgtacttattggccgctattttcaaattaatagagtccaatgtcatatttctgtatattgcatccctgttgcccatctatgcttctcctccagactatttcttcctgtgcttattcgcttagtgaaagtacattgccaggctagaaaggtggtttgttggctaacagtgttctctgcacaagcctgggaacccgagcttggttcctcatatccaagaaaggagaaaagcaactctgaaagttgtcctctaactttttcatgtgcaccgtagcccatgtgcacccacacccacaaatacacaccacacacacatacacaaaataataataataataattttaaatatatcaactgacttacaaacatttgtttttttttcccgatgacatttgtgatgttaacgcataatttgattctaatttagttgtaagcatattctattttgactctttgaagttttttgaaattcagtatctagctgtggtggtgagctttccacatcaacttatcataaccaagaatcactgggaaagaatatttcagttggaaaaattatttggatcagagtgatctgtggtcaggtccacgagaaaatgtcttggttgctaattggtgttgggggactcactgtgagtagcaccattcactcatcaggggacagtgagctgtccaaggcaagagaaaacgagaagacctcaagcaagcaggccgcatggctatttgttcatgcctgcttgtgactgtagacattatgtgatgagctgccttgagagtctgcttcagtttctcctcagtgacagacggtaacctggaattgtaagacaataaactctttcctcccataagctgctgcttcttggatgctttcttgctacaacagaaattaaaccaaggcatcagcttatattctgcctgagtgcgtatcccaggtgcccagaagtgttggctgttgtactctgcacatttcaatggagtatcagtcaggttatgatgtccttcctaattttttagcaaatgtggtttattttatttttttcaatttttattattaacttttattaattattccattcatttacctctcaaatgatatcccccttcttggttacccctccccagccccatccaccttctgtttattttaattaattaattaattaattaattaaccagtacagaaaaagtccactgaaaaatccatgtcctgggccccaaaatacaaataaaatcaaaaggagtagagtcctgctgctcacatttcttcgtgagtagttataacttccctgagatttttttataccagggtttgtttcctcctggtttctcctcagtgacgtcatcctgaggttagtggttactgtcactgtctctatcctcatcttgactccataatattcttcctctttcgatccagaccctcagggtttaagagtagcttcaagctgagaaaaggtcaattttctccaaaaaagcttccatctcccactgaaaatggccatctcagagtgaagtacactcattctgaaatgtcagggccaattggatggtcatcagaaagcttggcctggttgatatctttatcagcacaaacctgaaaatgcacagtcctccaaagggcggcctctttgtgctcatccgaaagtgatggaaggaaggcaatacaaaaggggctgaactctggtcaccagaagtcagaaaccatgcaaacaaccagtaatgaatagtgaattctagaattcaaattagcagatgttttaaagagacaagctttcaattttcattttaaacatgagcaaaacctgtgttctgaaagaaaagatttagagaagagaaaaagcaaaaagaatatctaacatattgcatgacccaccactcccacaatgtgctcctggtaaacttgaatcacatcttttctccatcccgataattctctaactctcaaggagaggcctgagttaactctctgaaattccatatcttaggcactggatcttcgtgattatcaggatgtgctgtctttatcactttgaagtgaagacaactgctgtcctgatcaatgactttgaatttaacttattctttttccgtcttgctccctaaagcctttggtggacagttttgttccttggttcttgggcttccccttcctaagagttttgtttgcatgtctattcagatgctaaaatattgtgttaacatccatggtgattattttaatgtttgttctttcagtttgggcagtttggcatttgggaattatacgtactttgacactattaaattagatgaatatagaattgtatccttatgatgaataaaccttttataattactaaactcatggtttataaataacaaaactccctgcatcttttgtctttatctgatattaggtgtagctgcatcagctttcttttggctaatgttttgatggtgatatctttttgtattgctttattttcagtctcctactttcttttggattatttaatccatttacagttaatgtacttactggattttaaattttacatctccctctcacaatttcttttacttctataacttatattcttttatattcttcttgactttttaaaaatgttaatcaatgccaatgttttactattctctttgttctatttactgtcccgttaatactgtctactgtgattctccaagtcattacccaaggattatatgttctttctttgacctgttacagtttactttaagttagtctttcttttattttgtatccaccctgggaattcctcctgggaatgatgttatgctagggtacaagctaccattgagtcaccaccctaccctgttaattataatgaataatgtaactaactagcttgcaacagcttaatgtcattgcaaatatttctcagctttccattattattattatatactttcatatatatatatatatatatatgttacaagattgttaaagttacaagatattgttgtattaaatgatcaatgaatgttaaaatttaccaaatatttactctggtttttttttcttattttatttatgtgagtaaattgtagctgtgttcagacacacctaaagaggatagcagattttattacagatggctgtgagccaccatgtgattactgggaattgaactgaggacttctggcacagcagtcagtgctcttaaccactgagccatctctccagccctactctgattatttttattccttctggtgttagtatcatccttctgtgatcatgctttttacttttttatttttcatttagaatcatgttttctgagttttggtaatggcactccactgtgggaatgtgaaatttgggtcattgccatctaaaactcagtcactttggcagcatggctcagttgaatggcctcaaatcccaggacacttatttcattatgtatctgtctctgctccaacaattgtccagagatactgaccagtaacaaatctcccaagacaaaaaagaagaaaaaaaccacccaggccattatcaaaatcacctcacttcattgtttttttcctccaggatcttaactgctcagatcaaatggaccatttaaagagctagaaatgatagatagatagatagatagatagatagatagatagatagatagatagatagatgataataggtagatagatgataggtatagatagataaaagattaatatttgatagataaatagataaaagataggtaggtaggtagagaggtagatagatgataggtaggtaggtaggtaggtagatagatagatagatagatagatagatagatgataggtaggtaggtagagagatagatagatagatgataggtaggtagatagataggtagatagatagatagatagatagatagatagatagatagaagtagttggtggtagcagtgatgataagaagataaaaaagcaactttatgttgccttagaagtagaatttgtcttcccatataaaactatatacaacactgaatctattataaaacatccttgaacattatgtcatgtggacagacaatactctgtatacacaaaaggcaatacattctttatcatctatttaatggtcagtattagtaaccaagtttaatcacaaccttctagataatactactgagatgccaatgactgctttcaatatataagcctgaattatgaacgctctataatgcagccattactttttgaaatttttaatatttttattggatattttctttatttatatttcaaatgttttcccctttccaggtctcccctttggaaactccctatcctaccctccctccccctgcctctatgagggtgctcctccacccacctacccacataccgactccaaccttcccatcctggtattcccttacactggggcatggaagactctcaggcccaagaagggcctctgccacatatgcgactggagcaatgggtcactccatgtgtactctttggttggtggtccagtcccagggagctccaggggttctggccagttgaccctgctgccccccccactccacggggttgcaaaccccccccccccctcagctccttcagtcccttctccaactcctccatctgggacactgcactcagtccaattattgactgtgagcatccgcctctatatttgtcagggtctggcagagcctctcaggagacatatcaggctcctatcagcaagcacttcttggcttcggcaatagtgactgggtttggtggctgcatatgggatggagccccaggtggggcagtctctggatggcctttccttcaatctctgctccaccctttgtctccaaatttcctccggtaatttgttctcccttctaagaagcactgaagcatccacactttgattttccttcttgggcttcatatggtctgttcattttaccttgggtattccaaacttttgggctaatatccacttatcaatgagtacacactatgtgtgttcttttgtggctgagttaccttactcaggatgatattttcaaattccatcaatttgcctgggaatttcatgaagtcattgtttttaatagctagataatattctattgtgtaaatgtaccatattttctgtatccattacttttatgtatcacaacttggatttttttacaggtttaatttaaggatctttaaaaataagatggggttaagattgcaagcctataatcacatgtatctgggaagctgaagctagacagttggaagttcaagaattcctgggatacataattagctcaaggtcagccagagcaactgactgataccttatctcatataaaaagttaaaaagaggtgtggacatgtatatctgtgattgaatgtttcatatcctaggtgcactttccagtactaagaaagagaaagaaagagagaaagaaagaaagagagagagagagggagggaaggatggagggaggaaggaaggaaggaaggaaggaaggaaggaaggaagggagagagaagaagaagaagaagaagaagaagaagaagaaggaggaggaggaggaggaggaggaggaggaggataacaacaacaacaacaagaacaagaaggaggaggagaaggaggggggnnnnnnnnnnnnnnnnnnnnatgtaccatattttctgtatccattacttttatgtatcacaactggatttttttacaggtttaatttaaggatctttaaaaataagatggggttaagattgcaagcctataatcacatgtatctgggaagctgaagctagacagttggaagttcaagaattcctgggatacataattagctcaaggtcagccagagcaactgactgataccttatctcatataaaaagttaaaaagaggtgtggacatgtatatctgtgattgaatgtttcatatcctaggtgcactttccagtactaagaaagagaaagaaagagagaaagaaagaaagagagagagagagggagggaaggatggagggaaggagtctacatatatgtcttatgtctgtacatacgaaatactaaagctttatctaatatttttcttcaagattacaacaagaacattgaacactaatacagagaacatctgcagtgatgtgatttgaggaaaatgaacccaaaggctcacttatccaggcactttgaatcactttcttaactctggccacttaatgaatgtggggaaaaggaaagaagttgagaaaatttgagataagactgttggaaagcaatatgttctatagttattgtcatgaattattttccccaagagtttcttttatggatattgtcctcatataacccaggctcatcacacagggcagtttatccaaagcagagctaactgtggttggaaattttgcaaatattgtaaagtcttgagaagcctaaaacacatacagaacaatgtggaattaacttctgtgaggcaggaccataaagccttgaacaacaattcatatttatttagagaaactaggctaaagcaaagcaaacaaacaaaagaattgactgagggaagtccaaagcgtattttgttccacctcctacctcagccttggtaaacagagctctaaatttctatttacaatgattacataaatattatatggtgacatttctgactgtgaaccaccatacactcaagtatgtaaagaaagtgtacacacaggaatcaatgtgttccaagaagatgcttgaataattgtctaacaaaatttatcccaggagacagactatgccaagttatagtacgaaagttatagtatctgcattgtacaatagcacaggagagagcaatgttactacaccccaagtttttcttttatggtaataataatttgttctttaacatttaaatcatttatgagttgtagattcaaagcatacattgtgatttctcttctgtgttcattacaggacaacactgtcctatttttgtctcctctgttgttattatgtttacataaaaatctttcaagacaaaatagttatgttctacatactctcttgcccttagcttccgtaacttttgccataagaattagtcttttctgcccacactgtagttataccaacatgtgactttgagtaccataactgaacttgaggcatactatattttcaaagggcattatacatttttcagcacagggtattagcccattgggatacagtgaaaaaaaagtctttaaaaacttgctacaggtttgagttgcaatgtatgctttgaatctacaactcataaagaatctaaatgctaaagaacaaattattattaccataaaagaaaaacttttggggtgaagtaatgttgctctctcctgtgctattgtataatgcagagaacttgtaagaaagtgagccacttggtagttcaagaaggatgttagagagaatcttaattatatagctatgtgagtccagaagtgtgtaattagtatattattccatatgtgctcttgagcttttaatttcaagaactgtatgttggaatgattttgccagaggcaagttaatgactgaaggaaggaaggaaggaaggaaggaaggaaggaaggaaggaaggaaggaaggggaagaaaggaagatgtgacttactagaagttgatagtagaattctcactggactctaagagtttaaatttattacaggttcttcctcctagcctcatgctcttagaaataagactcagattcaaaatatattttcatatactttggccatgtggctaggctcttctctgactaaaatcataacttaaaaccaacccattgattttcatctacatactgccacataccacatgttacttgtgctatgtgcctgtctcctcacatcttcctgggtggaactcttgtctggctctatcccagaattctttctcctcccagatgtcccacctcccatttcctgcctaagccataggccataagccttttaattgacaggtgatgcacccatacagtacacaagatagtctctctacagctaagttttgacattgtttcctaatgtagaaattattaggagctaatttctgaaaagttttaaaaagttatgtagactgtccattaactaacgtttcagaaaattgtacacagagaactcttatttccttttgcctagtaaattacctctctacataagagcgttaaaccagatatgtatgtcattgataatcactatattttttccgctctttacatccattccattagaaaactttatggctttttggctccattttcaccagtcttactgcctctaatcctaatacctttttgaatggagaactgttagatcttacaggcagttcaaatatccagaaatgagaccaaagtggactataggatgatttccagaagttagatagaaaccagaattccttagaaatttgtaaagccagttcctatttaccaaaaggattcacttctcttgtccctggcacaacggacatagagctccaccgacatgtgcctgtggttgcatttcaaagcccatgccatcctccaggctccttcagcccctactgaaatatacttgttacacatttcaaaggctatgccaacctccccagacatccatcctccttatacctatttgttctcttttcaacatgaatgattttccccttaccctggctattttccctatactttccctctatctcctgctctcctctttactctctcactctatgggctattctacattctctcatagatgcactggccatgtccagtctgctttgattctctctactctctctgattcacaataaaaaccttctcctcacctgtaccatggagaggacatttcaattgtttccttactgtttcccttgcaaaaggaagatcaccccaaaatttggtgccaattcttctactagtaagcaatccataaatattcaattagtgcgtatatagacaaatggacttctcctccaaattaataaaacttaaaatataacaagttaagaaggcatgtaacatgaggagctgtaaagaattcagatagccttctttggtattttaatggaaatctgtgactcaatttacatgtggaagttctagtacacacatgcttcatttagttaaatacgtatacaggtggaagttactatatctcttgccctttgccttgcaaattccacttaatcaatgccaagaactgaactaagaagacatgttcacctctctttcccttcacgttcaatgtgactcagttgtgaccctgaaaggacagtacattccatctgtctcacacctgcctggtgtctgggatccatctctgggattgacagcatctgtgtcctctgatttctactctttagaaaaaaaaaatcaatgcccacatcatattggtaacctttcaaaaagctcaagaagagtgacaagaaagcaaaattgctcccagggagcttcaattgctggtgaaaggctgatccaataagacctcctggcagaaagcacagacattccaggtcattccaaatgcctgtgacaatatgtcagtacactgtctgactgcgtgtgtagtagtgactcttaacatggttatttactaaccacgtgttgccatggaaacaaggtaaagcaacatgctcttgagacacagagacttagcatgttagagaggtggtgcctaaatcccattctacagccagtaggctgttcacacaggcagaccacacccctctaggcctcctattcttccttgggacatgagaaccctgtagccactcatcctcaagacatggtatccgctctcctcttgtatttgagaagcataacattctgaggctaaagggcggagccagccatcttcttgaccggttgggcttacaattatgtacttgacaatctccaacatgtttgaatcagagaggaatacagtaaaattcattcatatgatgctctggtactcctgcttattgaaatagaaaaaacagacatacatacttagactctcaacgtttgcaggaaaagaagttgaaaatatgttcaagagttcagatggcttctttgattcgtggtaagtttgagttctatggatttgggttactcgaactctgattggtctctggagtacatgtagacgttaagatgctatatgctctgagagaacagtgagctgagagggaagcctataaagtagtgacactcagatatagaaacattttcatatgatagtagtaatggtgccagcacttcttccaccaatgtcactgacaagcttcttgttactggaaggagaaaaagtcatcagaccttatgaaaaaaaggtgctaggaatacatgcgcagggattttcttatgtgcaagattcactgagctctttcttatgaccatataacccatctacataaaaatattattaggtgctaaatccacagcaactcaagctttggagccttggaaaattggctttaggaaaagagatcacctggcaagctccatgtctccctttctcacaggatttttggaataggattagggtcaacagtgatttttaagtctcacaaagaaaacaaaaatcgatttcttgcaaaactatcgctgtgcaagtttggttttccagcatagatccgggctgccaagaatgctggctccagctaggtcttcattagccaagtcaggggatagtcagggcattcatccaggtgacctgagccaaccccacccactcagaaaaccaagacaagtttgcctggtagagcaaggggcctcactggctgcaggctgtgactccatgtgtcgtgactgacaccacaaccaggtatgtcatgagaaaaactttgacaagctggatggcagctcgtcgttccttggatttcttccttaactttgctttctgtggctaacaactgccattgaatataaggttatgtaggaagaattttaagtatgccttaagaagttaggattgtgtccttttgtaaaaatgataaccctacagaggtccctttcatagcattaacctgtggtcgtgtaaatgggtactcagccttagagcccatctctttagaaagcaaatcattatgcaatcagacaactttaaagttggaatgaagttaccactatctcaattaggagtaaggggagagtatagtctgtaggagttatgcgacttttgagggtaacacaggtagctgggcatgcaaccaagcatacaatactggctgcgctctcattcaacgtatcaagagtcttctctgatatgtgacacaagcaaatagaaaactcatagcctccaaagaaagatcttagattcatcaggtatgtttgtatgcatatgtgtgcatgtgtgtgtgtgtgtgagagagagagagagagagagagagagacagagagacagagagacagagagacagagagacaaagacattgaggcagaaagagagagatagatgaagcagaaagagagatagagatatagagacacagaaacagagagagacagagagacaaagacaaaggaaatagtaataccttgggtttctggctatatagtctctctctctcaatttcttgtcattgtagcctgaaaacatctaaaaatcacaggaacagggatgactgtgcctcagcaaaactgttaataaatataaaaatgtgaatttacagcagtttcatgtgctatgaaaatttattatgttttgaggggttcttttctacaacataaaacccattcttggctcttagtggaccggattttgcctaggacaatagtttatctggcatagggtaatagaaccagcccaggagagaatgagctgtggactctgtcctccactcgggctctctgaccttgtagctgactccacaagcccccttttccttttcaagggttctgtcaccctacactgtgaaattagtcactgtgtgtctcttcccaaaacattccttatttcttaaagtcagtataattacaaggcttgtttagagcacggtcataaacgtcatagtgaggactggagcaaatgttgctttgaacataactctgtgacttcaactaggtggctatggtaaaaaaggaagtacttccgtttgcccataaacaactgtcttaaggaatttgctacattccttgagtcagctggatctctggacaggcctggttgtttagcttactaacagccaatctttctttccgactggccctgagtatgtgtgtcagtaggacagaaggccctctgggtgagagcaagcaaatgaagaccactgttttaactcagatacaggcggtgggggtaagtctcagccaagacagaaacgcttttccctcagctgtggtgtgagtgtttcctttgcaaactttgttgaaatgttattgatgttgtgatagtgttggtagatttagtgtctaactggtggtgaactgggtcatgaggtctcttgccttatgattgtctgcagtgtggagaatgggtaagttagcatgggaggagttcgccaagaaagggaaggctctctctacatcctttctctggcccctaccctctctgtgtcacataggtttaccttcctttctacaccagatgacacaaagtttgaaaaacttcagaaccattagacaagtaaaaactttcccagtctcccccaggtttctataatagttgataaaattagctatgacttgttttgtttatgttggtgttgtgtttggcatatgttttggttccttgaccctcagacccaaagagagaggtggttttctcaaggccaggataaaggcacaaagactttggctcagagccaccacagaagaactgtgagagagtcccaggagccataatccaggcgtcttccatatatgaagtctccaaaatcaactaatattgcttacactaatattgataccattcaacatgacaacttcttaaaatcactgacagtgatgcagtgtggggcctattaaatatagttatcaaaactttgagttgcaagtggcagaaaccaaatgcaagatgagacatataaggaaacggccacatcagctttaactttggaaccagccataagcatgccactgcttacgcatctcttccctctctgcttttctttgcattgacatcatgcatcatgtggagagacacacaagctctagccttctgaggcgcttagaatcctgatagctcacagtctcaaaaaggaagagattttatctccacatctatctcagtagacaagattttctgtccttgtttcagacattgctcactgtcagacccaccaatggaatggaaaagaccctttttggggtggatttttagattcccagtgatcagcatggagcaaacaatgggaagttgtgtgtgaaggaagggggggggggtagatgcaaggctaaaagctgtgcctgcaccaactgattcctgtatctaataaaaatgtggcttttaaaaacagtaagcatcgtagaacccaccccatgagtgttgaggtgattctggataattctttcctctctcattcctgagccgtcagtcttccctggtgaagacctgaaatagtacaaaagacgatgaatgggttgatactattgtgagagtttggtataaaactcagctctctttttgctcgctacactctttgatttctaccttttgtttctaccaagaatgatataccaaggagacatttactagctgtgaattcctggactgtggagttcacagcacccaaagctgtaggaaaaaaaaaatgtattctttagaaactacctagtcctaagtattctgtaaagagagcactaagcaggctgcagtggctgtggctcctgcagagtcttacttccacacagtgacaggggtatgtgcattcatcgtcccctgctcttagaagttggaatgcaaatcccttgaagccagggccagagtcactgttccacaggggactgccttccctcacaatacaggaccatcacttttagcacaacccacaggtcttctgaatactcaaaagcatgaagctaacagacagagccttatatggtgctaaggacagagtcaagtacagtgttagttagacacctataatcccaacacagacacctgaggcttttcctttagaagagatgggaagccaggggtgtggaaaattaaggttttgttcctgctcccttctccactcctcctcctccctcttcttttggtgtttttgctggatactgtgttccatgatgcagtttaaactacccctaaattcaaaatcctcttgcttcagccttcaaagtactagggctattgtcatatactgccattcgccagcctgtcagttcagctgtttgacttttaactggcacataccattatatgtattcattgagtacacatgttatttggaaaggtatagactatagaataactggctctacagtgtattgcctcagttctgtggtaagaatgtcttatattaattgccactgtggttataccatgaacatattcccctcttacaactgaaatcttgttccctgtaatcaacattttcctaccaaccccatagcctggcatgcacactcttagtcctcttgctctatacgagtagtagttttaggttctacataggaatgaggtcatgtatttgtcttccagtgtctggcttatttcacataacactctggagtcattcttgttatccaagtctttctgtaactgaaaagtatctcactgggcctgtgtaccacatttttattagccatgcagccatgatgaataatcaagctacatttttgatacagcaaatattattgcaaccaacatgggatatctctttgccatattgactttatttatttttttatacacaactagtagtgagatagctgggtgatgtgatgtgtctacttttaggtgtctgaggaaactccatagtgtttttcctagtggttgtactaatttacatttctaccagcaatgtgcaagagtcccttttctcttgtatccttggcaacacttataaattttatcttttcagagtagtggttctagcaatgaggttgtatctcattggcattttgacttccagtttctcaataaacatgatgttaacatttttaaatgcacataataggcacgattgtttttttcttttgagaaatgggcattctattatttatccattttgagccatacccttgttattaggttgctttgttctgtatgtattttgagcattaagccctcctctgatgtataattagtaattagaattccttctatcctttcattgttcactggcacattttgaagagatgtgctgtgacctagtgctggctttgaaagcatcaccctgcctgttctattggagacatacagtcttcagaggcacacagagagacaggagagcaatgaggagcttggtgtgatctccagggtaaagacctccatttaggccaggttggtgctctagataaaggtaagaggaagctgcattcgctcatctcatttaaagacagaggaagcaggtttcgccagtttgagctgccaagttgtatggaaagagatgagaaaagtcaaggataccatcaaggctttttgttctgagaaactggagtaaaaataaacatttgtagtttactttgttcttgactcacatgaaagggaagtatatttctgtgacagttaaaataagtacatgggtactttgaagtatggttttaaaactgtcttaaactaaagccatgaacttttattgttctgcctatgcaagcaatgtaaaaaaaatgcatgcatatgtatttttcagaatactaagatatataataatataatacacacacacacacacacacatatatatatagactgtttgcaaaacaatgaattcttttctgtatcattttataaatgattatgtgtccaggaatcagagtaaagctttttggagatgcatgtagcaagggttccttattaatttcataatttaacacattgagctaattggtttgctcacaagggccatagctgttagtcactgtacctttattcaagaggagagcagctaaagctggatggtgcagtaagatgaaccttggtcctgcagtctgtgcatggaactgacccctctcagcatcagactctccagccattcctttcattactttggacctcggtcccacatcttataagtgaaggtaacagaagccagtgtcacagatgcaaaaacagcgtctgcactccaggtgtccccgattactaatgacctccactgggagcagtttagttaaacaaatatttggttccagctgtattctaatttatgtacttgttcatgttcttctttgctataaatgattgctgaccttattaactatggcccttgtgagtgaagattgaaaccaatgagcttaatgtgttaaaactgtgaaattaataaggaacttttgttacatgtgtctccaaaaagctttattctgtttcctgggcacacaacgatctgagcatcagaaatgagcagaataaagctagacactgtaaatctatcattgctcctgagaaaacttaattaaaaatatactccaatgtctttttcatatttgaaaggtacaacctcagattattaatttattatggtattttactttgagacaggatcttatgtagcccaggttggcctggaactcattatgtagccaagagtgatcctgattcacctaccaccaactcacacttgctaggattataggcatatgtctccatgatccatagcagatcctttaaaataatggcaatgaataaataagtatataagcagtgaagaaacaggatgacagtgtgagactagataaccagataaccctaaactctagacactggtatgtctgtgtaccctaaattatttaggcttgtggtgcaagacgtcagaatccttctttcctcagatgagaacattgatgtcttcatgtctaacgtgtctgtttgcattcaatgagattatgaatatctccctgggaactgttggctctattagtagggaatatatattcacatgttttattttaaacattgctgttcagttttggaagactgtagctatttgaagctatccatgcactctattagaagtgggaatttatttttaattatcaattaagaagtcatccattgtatgtgactggctttgaacaaaaaataataataattaaagcacacacacactgtgtagacagacattgttacaatgccagtaaagggaacaaccacagcacatatggcatgaatgttgcttgagacctgagtataatccttaggtcttgagcagaatgagacagctgacttcctgtagctggaagaagaatgagtgcttgctgtgtacaatgctcaggaagggctgacagagacacaggcgagcagcggaggtggggaagacaattacaaaggaagcaacgaaatctgaacaaatcagagactctctagaagataacccaggtctctgtacgaataatcagtctgtcaaccacttcctctacctgctctctctctatatttttattagatattttctttatttatatttcaaatgctaccccaaaaattccctataccctccccccccctgccctgctcccctacccacccactcccacttcttggccctggcattcccctgtactgaggcatataaagtttgcaagaccaaggggcctctcttccgagtgatggccgactaggccatcttctgctacatatgcagctagagacaggagctcttgaattggaggactctctgctaattgtcttgtctatacctgatagccacccttcactaagcactctctgaaagtcagactttatatacacaatcttctcctctcacctttagtactatgtcgttatctccatattcaaatgaaggaaactaaagccaaacatttttcctaaaagacaaacagcaagtttatggaagacgtgtaacctaaggctgggattttccaggagcagctcccatgccttcttcaagaccctggcttgcctccattagcaaatgtacacatcacgtgagcatgtagaccccaactggcttctccactgtgtgccccgtcaccttaggagtgagaaagtaatgatacttgcaaacaaagcatccacgtgttacattatctcccacacacactacaaaccacacacactacaaatacttaaaaccagccctcaggcttaattaacaagaagtaaactatacaattttccaaatgatatctggactcatgtacagtgagctcatatattcatttattcccagagctgtataacttcaaaattaaactaattaattccttgtattgtcaagcaaaacattgacaattttttcctgtgaccgcctgttcctagcatgcttgttcttaaatgtgtaatgatataaagtcttaggtgattgtttttgagttgcgttgactttcatgctaattatctgagtgatggacaatgtgttccatctcctaactcacatggcctaatagacgtgtcaatctaacacagccatggcatgagtgccagctgtttttgaaacatcgatctgtcatctcacaagatgagcctcccaattttccttagtgtacttagtcatgtgtaactaggtcttaaagtaccctaagtttccttgaggcacagacacatgcaattattttcatcgtaagtcttgcctggatgaaataattgaacatgaaaagttgctgcaccccagtgaatccagtttataaaagcgtgtgtgatgaatgagatagggcagattcgagtgatcgttatggagaaaaggccattcagattaagcaaactgactccttcagtgtgtgggtgccacagaaggcattcataccagaaagctggaaatagtaatttttccaccttcccttgatgtttatgatttgtgcatttctccaaaacatcttcctattaggatgaactcagtcacaggatgatagcaaactgcgtgcaccaatgtgtccatgtctctggctactttataacaaaccaccctggacttcatggtgcaaagcaatgatcattttattatactcatgaattatgtaggtcaggaaatcagacacagcccagcagtgactcctctgtctgttgtgtaatgtctagggtctcagctgtgaacagtcaaagacttgggaactcgaatcactcttagtgtctgtcgaggatgatgtcaagaagctgggcttcttggcaaaggcttttttgaacgtatgctttctgcagggctcgcctctgaggcctctgaactctgaagaggaccatgcaagatcacgtgagatcttagagcagatgcacctgaagcatcgtgcacgtgcacataagcgggccttctctagtctaattttggcatccttgcagcaatggttcacctggatcagggaagcacttgacttacttcttaatgggtgaagaacaagaacatgttactagaagtttattcaaattgactggccgtgattactggtcagcaacagctgctgtggaactgttgcaggggcaaaggcagtgtttagggtcacatagtaatttaaatatcacctctcaggtaggacctacatcacttctgcctgcattttaaggcttgtggagccacgcctagattcatcacgcaagggtggtgtcaactgtgtactcagaaggaaaagagaactaccaatattgatgaatggtgatggttatgaccacttaaaaatactgcctccatgatgaaatgtggatgtttctttcaaagctagtttttgtaattatttgaatcagttcatacgtgtcttctgccatccaccaaatatgcttgatgggcaatgcacgtaacataagatgctggatccgggtgtgtatacagcccccatgaaaggcaggaaatcacttgaaatttcggtgtatggccttttcaattatttctgtctttatctcccgcagtcatttactatagtttgcacaccctactgttagtcaaaaccctgatgtcatagtcatcacatcggtacccttttgtaatctgtgatattgtatagagtgtgtagctataattaatatggaattgcaggtagatactattaattgaagtgtcccgattaatttaattatttcttaaatcatttcaaacaagagttatcttacatcaaactctgatagatagaatggttcgttcttactttcatttaaaatgtatatagatgttaaaagtacaagtagtggataaatccaggtataaagcagcttatttttcgaaagcagagcctgtggctatacttcaacaataaaaagagctaaaaccagtgtgagacctgctggggaccagtttatatttttgtctataatgagaaaatcatagtagcaaattgtcaaacaatcctgatgccctatgagaaacaatggagaaaaggcaagctctgggacaggctcagaggtgacagggtggatttaatttacttgtagtttgacatcagggatgcatctgtgcatctgtacatgtaacaactttaaatgcccacccttcctttccaccttgctacatctggtactgtagaacactgcatactagctggcctggggactctgaggattcccctgtctctgtatcccatcttgctgtagtaatgctaggattacagactaggaatgtaatcgtgtgtgtttttatgtttggcttctcatgggtcctaggatccattcttcagagttgtaaagcaagggctttgaacattgagccatctcccagccttggggaaatgtcttcacaggtagctctggctatgtagaaaattgctggcaagcttagttaatacaggcactaaattgtgctgcagaatgctccagtgaaactctctatggataacttggtaaaagatcaaggcacttcagttaaacaatttacctaattacctatttaaaggcatctaaaaagagatagaaccaaatgaacccattggaagcatagactagaaatgcagtaatatcatgaacatgtgtttaaataaatgtgtacatggcaaaagccatacagcagcatggctaagcttcttcatcaacatgtattcaaaattatgagaaaacctatctcaaaagttacatgagacaactacttgtccagttttctgtcctggcacatctatgttgaataaaacctgtcagtataggcttatgatcagagtcgtaaatttgctaaaacaggtacctcttccctaggtctgtcaaacatggtcaatcagttacagcttagggcttaaatctcatctaaggctgagtcagaagaagttaacataggttctatcaaaaccacacacaatgctggagataaacattgtaacaatgactttgcctactatgataatgaaatgtcaggtcttttgaggtctcagtcagatgtaaaacagactagatactgattgtgctaacagaaatttactgaggaactcagcatttgtctctcaggaatcttagctacattgtggcagacaatgattatcaggttcatttacttagtgctttgcggtccaaagcacacacctctcatagcccaatgctatatttcttgtaccctcccagaactttgaaggctgtcatggtcactgttctatagtagtgaagagacaatgtgaccaaggcaactattatatgaaagaaatcatttaattgggagcttgcatacagctttataagtttaatccatgattatcatggtgggaagcatggcagcaggcatagcaggcatggtactgaagaagaagttaagaataagtgggcctagcatggacttttgaaacctcaaagcctccctcaagtgacatacttccttcaacaaggccatatcttctaatccttgaagtcttttcaaagagttccactctgtgttgactaagcattcaagtatacgagccaatggaagccattcctattcaaaccaccacaaaggctaatcctctctcaaaaacaaaaaagattatgtatatgtgtacattttcataaatatgtcttacatatttaaaactctgcatgtagatataattctaagacttcctaaacatgcagagggtctataatacactttggctagcttgtgttcaaatgacattttgttgttgttgtttaaagctaggaattgccttcttggaaatatcaaatccctacagaactattaatgaaaaataactatctcttttaaagtaatttttttaaaaaaaaaagcttctcttagaaaagaaagggaactttttctggggtgcatctgtaaaattttcttcagtcctcaaaacagtcctttaccaatgaaaactccagacagcaaaagataaggttgagctcacaggactggtcaaccatagggattctatcacaactctgtgctgcctgcatcaaagccccaagaccctccagcctctcccctcagcctcagttcttgcgcgcgcccgactggccagcagtaacgacgctgtaacaggatccttctgcacacgtttattgggagagcttgattgcagaggcgaagagaccctgagcccagaactggtgctgcttttataggcctaggagaggcgtgtctcatacccggattggttatgcactacgcctcatttgcatgttcctcatctgattggctactctctctctctctctctctctctctctctctctctgtacctcacagagcctcattatcatacctcatttgcatgtctcacatctgattggttatactctcaaagcctcattattatgcccaggccaggcagtgtctttgcaaaaaactttactgcatatgtacacattggttgtttgtccaaacttatgcgtggtggccagcagtagtcagtgccactctgcaacggcacatgtggcttcccacactcagtcctctagcctcacctctgctctacagcctctgctctcctcagcttacacagcagttttcaataaacagtgaccattcactcttagtagcatcgagcctatttccctcagcaaagtctagcagcagcccatcccccttattagtgttataaacagtgaggacattagtcctaaaaacaccggtgtgtacccaaatttaatggacgggatatggttggcacattggggggggggggagggggaaggacgggagggtccgcatctgtaggtgacaaagtaaaatacagaatgaggaaatgttcttttaaaattaaggtcaaaatcacttctggtcaagaaaagatagtgtgggatacttaggagcccagtttacaaaactgccagagttggtattatggactcaaggacttaagccaaacacctttaaagcatatttctttaaaattcacagaaaattaatctaggattattgccctctttataacctacccacaagctaaatgtttaaaatttaaatatggacctgaggggacttccttcctatcaccaggccagttgtgtgtctgtacttccctcttccttctcatctccttcccctccaaaaagttagaaaattcttatttcagaaaggcttagagaaagactaagttagaacattaggtcagttttctgagaacagctggataccatacttcatcaccctctctcttgtagaaagcctggcttcataaacaccctaggattctctaagtgtgcatactctgaagccaccataaagagagtcactaaaaagtcctcatttctaaaccactgacatcctatgttcccccacatcctgacttcatattctcatgatctgtaataacgcacacacaggagaacatatgtttgcgtgcagcttctacctcatttaaaacttgctaagaccacatgtatctgatctacatatattccctgttatatcacagatgctaggtgtgatatagcacacagttgataccatcccttctcaatagttactgctagccaattcccattgaatgcctatggcaattgactattttgttaatagagttggactctgtcaatcagttgaaaaagtcacttcgtaacttttccactatgctaaaggtcatggcaaagttgtaccaggacttatgaaggttctttgttagtctgttcacagtagcagcactagagaaaatcttatgcagttgttatgaacagttgtacttaaaaatcaaagaaaaactagattaatttgaggaagtctctcttcaccaacagagtttaaatgccctccacattaagtggatgtttttaagttttccatgcaagaattcaagtttctaactctcactggacaagctgtcttattcccaactcttccttaggatcttctttttgattatattaccataaatgtttattcaacatgtgtgatactcatgactacttaccattgagagagtaagtggcagcctagccagtccagggcagccatgtttccttacactgatgagcgatgcccttaatcacctaaattccaaaactattacacttcccatgcagcattgagcatcaaaccattccttataataatacctcagaggtctgggccctttagctccctcagtgacaaagcaatgacactaagcactgtacaggaccgatctggctttcaaactaaaaacaactatagacagtagaaacaatggccatcatcacttttctttcctcttaggtgaaggaaccagaggctgataaaacttaaacccctacaatagaaattaaataaaacaaatttagtgagtcactatggcccaggaaaggcaataagtggttaaaaggtaaactgctgtcacgatgctttcattacacagagattttagggacatgacatgaattttggcacagaaaatcgtgtgtaaatatcacgtgggctatggtgaaaggcttaactatttattttcctacctcagtattaattacctgagtcacatatataagaatgggtgaataaatagatagatagatagatagatagatagatagatagatagatagatagatgagttcttttttgtatagtttataaagaagttcctaactaaaaacaagttccaaagtactgtgctcttttatggactttcaatcagtctgtaaagcttttgtagggcctatcatgagccaggctcggggcagttaggaaaatgcaaatttaataaaggctttggccattaggagcgtgtgtgtctttctaagttacgtctatgcaacaacaatgctgtctgtacagtagagtagagggctcagagaaagcaatggaaattcacagaaagaggtgaaagcccttgtaattcatataccccagagaggaacttaaagagtgtgtttagtaggaataggcacctgccaaagaatctatgaaccccaagatatccaaacttcttatagtcctggaaggagtttcttctgagttggctcagttgtgcactgaccgctgtttcctgctacatcttctcagagcaaataggaaaggaaaaatgcttctgctctgtattgtatgctcctttcattaaatcaccctcgggacaactgagtgttccagaaataggtgttggttaaaaaaaaaaaaaaaaaaaaaaaaaccaaaaaaacaggtatttctgtgcaatcagaaagtgcctctgctttgttaccagcataaagcattcatgaaatcaattttcagcacccactggatagggctgatgtgcgaactagctttgcgtagcccatcgtcttctttccgagatgatttgacaggactggcattttatcatgaatacaaagaggatgagcatattctcctaatatattcattacttccctctccgaactggtaaataatatacatatggtaatttgagagacatagtgttccccattgctcctttttattcctggaactctggctgtctttgtaaatgctgcaaaaatcaaaggcaaaattacctcaaaatttgattttggagtccttctagtctcactttctggtgcccacacaagagctattgcttattttctgttctgacctgtattattcaatagcatcaccccttctgcttgcaatcttattgtagaaccttctagagtgactcaaagaagccatctatttattcattaacaagcacctattaagtacctactctgtcccagacactgtgctaaatgttcaaaagaataaggaccatggaagcctatggcccaggcccattcttgttttctcgagttttgtaatcatttctcacacaattataaaaatccatggcatcgtagaaagataggaaagactgtggagtggatgccgtaaacagaactaaatgaataatgaatgacaagctgagaaaatgtgagtgtttgccagagcatgtgagtctaattagcaggcataaactgatatgctaaaccaaaacgtgatgagattttagatccaaaagagccatttttatagactggacctgaaagaattggatttttagatgggagtatgaaggcagatctgaagggcagttttcttagaactaagtgaaaacgagatgttttactctgcacggacttgattgacttgccatggcttgaacgatcagaatacaagtcaattgtgatcagtaatttcttcacttgtatacttaaaagtgttcattgacctactgcgttagatgaattggtctttgctgaaagcaaaggaaattaaaggtctgctcttcttgaatttgtgttcagatgaatggacaatgggagtaaatcagtgtatggaagccccagctagataggcaccgagacgtaggctgcaaagaagacaaatgggtggaagatgtctctataaatatacatggttgttagggcaaactgaccatgcacattgggggagaggaggattttaggtcgaaaacaaaatagctgactgatatttgcaaaagatacttctgcctagaaaatagcagtataccactgtgtcagagtaagcaagttacagtcagcaaactcacctacaagtgtttctgctgtctgacacctgcttttgtaactcagatatcctcggaacctgtcctcttatatagccctgtggattatcccattccacatcaaatgtgttccatggctgcaatcaagtccatgctcaacagacatgaagatatgacagtctggtttccatttatataattgttttgttgccttctttattcttactggatgaggtcttattgtgctgtcctgattgacctgaactctgggtttcaacagtcctgataccctcagccttcagagcaaggtgcctcccagttctgccttattttactctctctctctctctctctctctctctctctctctctctctctctctctctttactaactatgaattcacaccaacagtttctagaatctcttttaaagcatacctgataatgatgctgatattggttaaaataatgtaacaaatgcttcttttattactttatatgaattacctgtcatttaatgctctgagatggtgtggggatatagggcgctgttatcgttccattttatagatgagaaaactgagtacacagagataaagtaactcacttatttccataaagcaagtaagtggtgccactagagtataaaatcaaacaacatagttagaaacactatccttatctgtctttagtgtttatttcttcacagctccatcatcttcatagacacacacacaccctacttaaaacctgcatgtccataatttccacaagcaagcaccttgagctgaaacattcggggctgttttaaagtaaattttgctattattcctttggcagaatttaaattgtgaaggagattttcaagtgatttcctctcaggcttcatttagaggcattgaataaagtaatagcacctttgagaatgcaccttgacatcttagtgttgggcacctgtaatgatagcaacgtgggagtctgaagcaggaggatttcgagtggccaggcaggggaaagagagaggggggagagaggaagagagagaagaaagattcctactctggcagactaactgtttctttaactatcactattaaatacactaaattattcttcagctcctccttcactgtggatccatgcctttaaaacaagcaccgttgtcccctttgcctgtgcatcctgagtctctatacacctttagcattctgacccaggattctcaattgattgccactaaaaccccagatatgggtacaaatctgagcaaattgatctcaatatgcattagcataattagaattatctagggatgtcagatcatcttaagcacctacaaagtcctattttgaacacttaagtataattagcatttgtgaaaggtctctggttttcaagtgtcttgcaagactcttgttttttttttttttttttttttttagtaagcttctaaaagctgcttgtctttaggtgttcagtgaacgggaaagataaacatttgaggcttgcccttttcctctttctgactaaatgcgggtcataaagtaaagccacggatacagcaagccccatcacacagatgaacacagatagcccttgccctcatggaagggatcatgtagagtcctctctattccaaaagaacttcacaatctccataactacgtttggcatttcacatctgtcttgtgcttttgtgacatgtggattagcagacagtgcctcgggctctcatgatgaatgtagggtaatacagcagcccagagccatggcacctaagtatgacttggatgtgatcccacttggatatgatccctaagggacaggataaggacactagatcaaatttggatcaaagaagaattggaaatcaaagagttgagaataacacccagccctgcatctgcatctgtttaattagtcttttctccatccattttaaatgtgtcaaaaatgtgtaaagatccattcaaatagaaaaatagtaatttttcatggagtgagggcaggaaataaatgtcagattcccagtagtaaataaatataatttttagacatataattagctttcctcaatctcagtgtcttcatcctaaaagggcttacttttggtaaaggggaaataaacctgaattgttcagttggagtccagtgaaagagcagcaggcaaaagaacatcacagctgctacagatcccactttctcaggaatgaacagctcctttgaatggtgtctacgttatccaaaatgccacaaaacaattgatgataaaactggtggatggacatatagtctgaatgtttctcaaagctcttagtactcaaagaacttaagaaaaggggaataaggaggtttgcctagagtagagtgtttcgggcagaataaagaacccctttatcttcatttattaagttgaacagaacaaataagaagctatccatctctataaaaaatcaaatacagttagttccttaatgagttgcgtcttttgctcctaactgtaatacatacaatagtgtattatttccttttacccagatagatttcctgaaaccataatattcagaggcagagaactaaaggttaatttaaaaaaaaaaaaccctcaggggtaaattattactattagaggagaaagttatatttttaaagcttatagtattatttttccaaattaatttttaaaatagtattttcatgtattcttgaaatgtaagtatattctagattacgtaaataattgataatggactaccaagaaaaaagtatacatgtaatattcaatatacaaattagcttcagtaaatctctcttttgagtcattatttccactaaaatgtctcttacattgaaattattctatgaaatatgaaatttagaatataatggacaccttcttttgttacttaatcatgacgtaacgctttgtctccttttcatatttgaagtgcagaaacgcctttaacatcctaggaaagccatgtggatgtcatgatctggctttctttgttcggataatatactagattattttctttcttctgaacatcttaaactcctagatgagtttttccttcaattttaaatgcttttgaagcaggactcattttgtttcgagcatttcttggaattacatagagttgagtaaatatgaatatgccagcatccttctaaatggactacctttaaactgtttcaaaagtaaaccatgcatcaaaagtcaactcggaagacctgtgttctctcatacccctacacctaccctgccccctgtgggtttttttttttcttggtaataacaataagtgtcttagttaggatttctattgctataacaagaacactatgaccaaaagcaacttgggaatgaaagggtagcaataagattacaggtctacatatcacaatatatcactgtaggaagtcagggcaggaactcaaacagtgcaggaacctagaagaatacgctgatgcaggagccatagagaagtgctgctcagtggcatgctccccatggcttgttctacctgccttcttagaacacctaggaccatcagcccagccatcacaccatccacatgggctaggccctcccacatcaatcactaatcaagaaaatgcactacacaaacttgctcatgagcctagctcctgtagacattttctcaattgagaattcatcttcccaaatgaaaatgactctagcttgtgtcaggctgttataaaactcaccagcacatacagcgacccaaaacttcataggtactttgaaataagtgaatctccaatcatgctgctatccttttaagaatttgtaactatccctgcaaactgttgtgggctatgtcatggtctctaaatgccaccctcttacatcctaagcagaatgaagcatgaaataggaactaaggtgtggcacaatgcagacaactttcctctgggctctccttacaggacacttctcagccatgaatcttactggcctctacctttcacataaccagggaaaccaaaacatacatccattttttaatcttgtcctcttccccacacattctcaatcttttctcactgttcctccctcacaaaagagcaagcataggaacaaatgagaaagtttctgactgccattgactctgggaaaatattagtcttgtgctgattgttgcagtgatgtacatataacatgaaatttactatcttaatcatttcaagtgcatggttaagtacaatcacaccattatgacaatccccagtatatttaaatttttatcacacagaactgaaacaccttatctctatgctacactaaccagtcctttcaaaaaattccaagtcgtaagtctaagattaggcaagacatagcctttgtgctcttaaacacttttccaaaatatattcattttaaatttgtatgtataaaaatgaatagctattttagcatacagaattaaatcagtcattttaatgattctactgattggcttccaggagcatctgtgtgtcttctcattaaagtaaccaatgcattacaactgtcattgctctgtgactcttcttctcttgctttgctatttaatgtttctttgaagtcaaagagtagctcttcatgatatgcatccaagtgtgcacttaaatcatagaacttattcttagcaaggaagtatgtagtgaagcacctggtcaaatgggaagacagccttgagaaagacaatgtttttcctgctgaatttctaggaatagccaacaaagtgggagtcctgataggtgagaccagcagtgtgctctttcataacctctttcaattactctcaactcttctttatttttggatcctatgtaaaattttctataaagaaaagaggttatactatgttttgaaacaaaacatcttggatctcgaggaacgttttgtctcattattgagattcattggaagcctgtcattgaatgaaaagatatcattgaaaacatgtggcctttaaaccaaccaccgactctctccaagcctcttttctttatgactagaatgagaataacggtgtatatctgcatcttctaacacctgagaagatttaaaagcagtgagcagtgtgctgccagcctcctcaccctgctgcctaacaaggtccctcccacatgagcagagcaatccaggaagcaggtgacagaggatgaggtagtccagagcagagacaggaatataacagaaactggatctatctggctctggatactagatctaggttggacgtaatgacattgggagctgtgactgatgggttctcaaccagatgccacctttctcagtgtctagaggagtggtatctaacaatgactaagatggtttcccaagagaatttgatactgaaatctcactccctctccctctccttctcccttttccatcccttttcttctccctctccccatcatcctcctccctcttcctccaccttcctttccattcctagtgatcaaattcagagccatccacatgttcgaatattagttaggcgcgctttctagcactgcggtacatcatcagccctggaaagacttattgccatgaatgaatcgttactggcatgtacgtgatcaaggcagagccaccatggtccatgggttctgttaaatacctcactctgaacatgacaaaacctcgatataacaacattaacagcttaacacgtcactcgtgctgaccttgagaaactctacttttagagactttctgacataggtgcctctccccatcattgatttcctcttcgtctggtaacctggaaattcttcaggttacttttgttctggttctcttctttgttcctttgtccctctcttcatcccttcttcataactttttcctttcactgacttcactaagacaagattcttttgttttcttcactaactagtaaattgcttctttcccaactcttactcttaaaagcaacagaatagagctctctaagggaaaataacataaagcttgaaaccacataaaactgcatttgtatttgtgtagacatgcatggattgttctttaggccagtagattcagagacaaaaacaaacaaaaaccatcccccagtgttacagatagttagggggactggactgtgtaacatcaatcccaagaaataccttaagtaagtactcccaggttctttagaatgaaaaatctaggaggtgtcttagttctattgctgagaagagacactataaccaaggcaagtcttatttaaaaaaaaaaagcatttaattggggctggctcacagtttcagaggtttagtccatccattatcatcatgacagaaagcactcaggcagacacgatactggagaagtaactcagagttctacatctagatcctgcatgcagcagggagagagacacaggacctggcttgggcttttaaaacgccaaaccacaccctcagtgattaattttctccaaccaggctatacctactccaaccaggccacacctactccaacaaggccacacctactccaacaaagccacatgtcctaatgctactccctaagcattcaagcatatgatcctatgggagatgttcttatccaaaccatcagagatggtatcagatgccctataaaggagtagggctttcaggccaaacttactttgaaaggttctcaaatgattatgagacacaacgggtttgggcaacataaacaggttgtttttataaatttcaaccactggcttgctatcttatcactcaaccttttaccaatgagcagatttcaaccaaaacaacatttttttttttgattagttgagtgaaatctcaattcattgcatctcaatttattgtcagactttaaatcaagtgggcaattatttattcccatcaaggcagccttttgctatcctgtagccaaaataataaatactggttgttagttttatattcaaccttgttcctcagtgttttaaattattctgatacagctttggatggagagtgaataaaaagaggcatggtctctggagccccagatcttctcataaagacccaagaataaagtggtctaaacaacccttacacacttgctcactcactcaacaactctttggaaaactcacccaatcccagctccgtctcttgatttactctttattctcatgactgaagaactcagctgtttatgttttaataaaaaatggtttaaaagaccaagcagaatccaatggggactgtttctgagatatccagcttactggcatattctaatgtctacttggcaataactgaaagtgtggcctttgtattccaagtaactctgtctttgagtagtttgcagatttatcacttgttggtctacagcctttaagttagggatcatatccaaagctgcctggttttataggaaaagcctagttgtttccaaaagcaaggccaattaatagagcattcgagatatttgagatctatttccatggaggaaatgatcttaaagtgaagttaattaggagtgcagagagccagagatgataaattcagaattgcataatagatttgtatactaaaggggcctgtgtcatctccagtcctaaagagaccggctgctgaagaatgagactcagaaaaatgggtgggttatatcgcctccagctttccatgtcacatgcacatgtcacatggcctttcatgacctatattaaagttctccagagaaagagaaccagtgggttattctgtaaatatgtgtgtaggtttatatatgcatgtatatataaatgaagggagatttttttatggcaagggattgaagtgatgatattaagtttaaattcaatctggagacctaggaatgacaatgatgtaactcattctacatctcaactgagagattcctggtggtataacttttacttagaggccaaaacctaaggtacagagtagagactgggggagtctagtgacctgaaaaccaagagctctcatgtccagagtcaggacaaaatgaatctcacatccaccagacttttagtttttctgttctgactcttaaaggattggatagtactcacctaaaacaacaacaaaaaagaaaaaagaagagaaaagaaaacaggaaaaaccattctccttttgagtcaaactctattctcttccagtaatactgtcagagatacatcagaaatagtatcttaccagctatcaaagtaccttttaccctagtcaagcagactaggctacacaaaattgaagcctttatgtccctgtccatagaagacaggcttagctggataatacccaagtcctctattatagcatcttgccagctatcaaagtgcctcttagcctatcaagcagtctgggccatgcaaaaatcacgaagcctcagtatccccatctgcaggagacaggcttagctgaataacacctaagttctcaattatataccagtgctctatgaatgcaaaaataaggcttggaacactctgccttgaccagtttaagcatcaacagaagctgatcgctggacatgccttcaatcacaacttacacattaacttattaaatttactagctaattccaatttgttttctattttgaatggcaaaaattttcaactgggtctctacttgattttatcaagaaattgatggttctgtttggtataaaagtattttggttctttttccagaatatggtcatcattactagagatataaattgagctaaataggagtaaagtatcatgtctgtgatttcatttaaaaataaagataaaataaaatgtggctagatcacataagatgctgtttgggctggcaacatttctcattaaaaactatattctgaaaaaaggtatcagggacctaggggagacagatatgggtaacattgactgttctgggcgtggaggttcaatttatttatttgccttttcaccctctgtagtgtgtgtgtgagtgagtgtgtgtgtgtgtgtgtgtgtgtgtgtgtgtgtgtgtgtgtgtgtgtgttagtgaagtggaatcaatttcctgaagccttgagagatttaaatctcttcactgagagtgtctcttcaactgcatgcaagcatgaatgaatattaagggtaaggtactatgactgccctcttggttcatctttccattgctactgcacaagtcccagaattttgaatatcgttgggtcaccatttgtcctataggcttctgtaacctccttaatcatttgtatataatctaatgtgtgttcattacacagattcaaagcttatgttggagtgtatctgtagatagattgggctttctcatattcttccctctaccctccttgttttatatcttcacaacatcttttcttttcctttttttgtttgtttcttgtttgtacatatgaatttaaaactgtgaatttatctgtctttctatatctggcttgttttgcttgacaccatgacctgtgtttccatccattttcctgaaaatgataatacttaaatttttatggctgaattaaactccattgtggatttattctatgcttttatcaatttacctattgaaaagtacttatactgcttttataactcggctattccttaatcatttttctaattctttctaatagacatcctattaaataaaactgaacaaggtattgtaccaatgaactcagaacacatttactggctttacatagaacattacaacttttcctttggaaggaaaatagatgctgccctcgagtagggtgcacactatgttcatatcaattaacattggtgaaaacattacaattcaattggtccatcagtaagtcagagttgtctatagaacacatgtttataaccctatatcccgctctgatagaaataaccggttagcttcttaaggttgatatagtaaagttgccacaattaggtggcttaaaaaaacagaaacttattttctccaggttccagagtcgaacaacttagaatctaggtttatttggtactgtgctccaattgaaaccctagatagaacccattcttgtttctcctgaacttttcatgagaaccaactgccttgtcatttctcagctgaaagctgcatcctccaatcttcatcttcatatgtgatctctcctgtgtctatgacttataagcacaccatgagattaagggcacaccctatttcaggatgacttcatctctactcattacactttttccaaacaaggctgtgttctgaacatagaagggcttcaccatctctttttggaagaagcaactcaaaccacgaggccatccaaacaaatgacactgtgagatggattccatttgaatcttttatcatagctatagttcctaattttacaaaaatgaagggctaaagtttacttcctgccatgcctgggaaataatattcagacaacatgttccaggacaatgtctaggatctttagaaacacatactctgtgctatatggctgttctacagaagccacctgagagtcacaatagagacatcggatgtaagcttcttctgaaaagaattaatgatgcttctatagcttgcccttgttataccacgcccactcctacctaaagtccttccactccatctgaatcactgaaagctttaaatctaactgtgttgatgctgcagcaggaaagccacaaaccaaatcaggacaaaccaacaacccaatcagaagtattttatacaattattatgttggaggttgtggtcttttcttacttgagtttttctgcaatgagggagaaatagtgaggaccttttgtatctctaggtaaatattaaatctgccagaagagccagttacccaacaggtagtcagctcacaggtcagtgctcattggaagatgttcagagccagaaaccaatcccagcagggatcctatgcaaatctagcaagaccttggctttcatcttctatttcctgaaacaagcacccaagtgttaactggcttgtgaaataccttgggtaagtctcttgtgtgtttaagattctggctgatttacatctgccaaaaaggggtatttgttatttcttgatgaggcccaggccctctgcactaacatgtatgttttcgattttcattcccaacctgatgcttgacactctacatgctttctagggtgaatgaaagaaactgagaatcaggtttctctgtcattagcacagaatcagctaagaaagaactaggataaagatggaagaaggggaaatgaatatcataagactaaggaaaaacctttaatatgaattacaatgattaaggattagcattagaaagtatgtgggtttgacaaagctactggaatctttttagactttagagctctcacctttcttgaagtcacttgagtttgccatcttgagatcttgactattatgtaaaacctctaactgtgttaggtcaaacaagagtgtaagaggtgtgagaaggttgcatgattgcttgtgactcttttgttgccagctaatgtatgagtgtggaaccagagcagagaatagaatgaatggaacaatcaccatatttgctgaataaatgtctttgtccattttttgttgccattcctgtactttatgaagcaaattagttcacttcctacaagtctggacatgggaagtccaaagctgaaaggcagcatatggtgagaactatcccactagtaaagatgccctgagaacccccaagccccaagtcagcacaggacagcatatgtcagaacaaccacgctgacttgtgtgtctcttcctcagattacgaatccactactcattatgcagacatccctctcatacctcatcgactcttaattattcccaaaggtccaagctccaatcaacactaacaggtggtttgtgggttatgagaggacaaacacgggaagaacctagtgaggcatttcaaccccaaggatgaagttggccatcaccctggtttcttcaataaactgagcaaatgagtaacagtaagaaaggaatagtaccctgatgcctaaagtctcaacaccagcatctagaaaggagtgcacacgaccccaccccttatcttccttgccagtttctgctttttattcagtaaccattgaccctgccaccattcatcaccagaagtcacagagttgcaaggttatgtcctcagtcaactcagctttgatttgtccccttgggtcctcacttagtaaagaaaagagaacaaggcaatactggtaataaccaaaactgaggcagatatggtttggcttgagagatggacttgataagaggagaaccatttatcacttggatgccaacttctcatttgtcaaatgtttgatgggtttagtcatgaagtctccaggccaggaggactacatgttaaatagcttcttacttattgtcatctattcaaaacaggtcggctaagcatggacaatgggtgttacgatatcttcaagtaagctgtagactgacaggctagttcattttttactatctattgttataaattcatggatttttggggggacattctcattgtgcccatcaaatgccttgatcccactcatgctcatgctactctgctacccaccgcagcctcttttcttggtctgtattgtcttccctaatgcagccttttagaaaataccttcattgtgataaagtgtacatgcttaaagctcatgtttaaaatgtatacttcagtgggttttatgtagatacagagttataaaactgtcagaacaatctaattttagcacatatcaccaagttaaaatgtgtatgttagcaggcatagctcatccccctactctctccactcccgttagcatacaatactcagtctgtggcaatctctaagtcactttgctttgctattgcaattttttcataagttcctaccactgcctagatcataaaatatttcccctatatttttctacagtaaattgaacattgaagttacatattaaagtcttgatccattttgaattgattttttttttttcgagacagggtttctctctgtagccctggctgtcctggaactcactctgtagaccaggctggccttgaaatccgcctgcctctgcctcccaagtgctgggattaaaggcatgcgccaccactgccctgttttgaattgattttttgcaaaatgggagatacagatttaatttcattcttcacaatgtaaataccagttttgccagcacaatttattaggaaggctgtctttttattgccagctttgtcaaagattagatgactggagctgtgtgggttgatctcaggtccttaatttcactggtctataggcttgttcagtactttgctatgatatcaatagcaaaagtaaattctattagtgtttatgaagagtgagtgtttatgaagagtgagtgtttgcaatattccttaatggtaacagcatgaataagattccgatgtctatatctgtggttttcaactatcttaatcgacggcacttaaatgatcctttgcttcccattgtaataaaacatatctaaaatgtacagatgagtttggttttgtttatgtgggatccaactcctgactttgtgtgctcagctgacatgtctgtaacggaatgttctgccagtctccagtgctgtctaccaggaccagctagccacctaatgctgtctgtaattttaacttcatcttctcacaggctgagtataaatgaggagacacagtaggagatatacggagcaaagaggcttttaaaggtcttaggattcttccagaatcactattcaggatggtcttccttaagaatggcaaaaccctgcatgtttatcatttgtatgtggacagttcaaagttcaggaggcctcttgtggatgtttcttgtcttcggagtattaaataatacttaactgtcttctgttctcatcatcgaatgaatatgactttgttcttatttcctaggactatgctgtcagtgattatgaataagatcattaatgtgtattcgttacttcagtttcttgtgtattgtgtaccaaaaagaaagaacaacaacccaaaaagttggttagaattagagactactgccttgtcataaagatgtacatgctatatttatacaactttcagatggagcccctctgttggcccatgctgactacatataacacatcaggttcgtcagcatcttattcctgggatacaactacaacaacatgctcaaagaaaaagaaaccttggtttttttgttttttgggtttctttctttttttcataaaagtgattgagtgagttgtatcattaagcaatgatgtcactagaactcataaggggaaatcagaaaggcgaacctggaaacgtctcgaagtaaaaaccaggaacccccagcacagtgagtgcacggactcattgctgtcagctgaggaattgctcttgtgtccctgctactggagctctgacttggtgatgtaagatggccatctccctcaccactcatccatcagcagcacttttaaatttaccttggaaacaaaagagcaaactgaagtacagtgcgtgtcatatgatgagttcaactacctcttcgaaaggcaacatcagagagtgagatcaacaactagactaagaaggagaagtcactgttgttgacacaagctattaatttactgctctgaaatgatcgttaactgttttgctccaagagagagaaatctgttcaagggacagagagaaatattgtttagatggtccctaatgagacagaagtagtagggaaatagaaatggatttccccactagcactgctccctaaacaggctcccttattaaccagcataaaggatggaaacattttggctacataaccctacataatcctaacccttggatactaagacgagaaagtatttactctctgatacttccaggtaaagaggggatgttctcagttcagatcaccagaaccataacggttctcttagttaattagaagagtatgttctctcctggtgtacggcatttagtgacttccaacttttaaaaatgtaactttttataaacctcctcgcgaggatttaaagaacaggacacaggtgacatttaagaatgattttaatactgcaatcaatgaggaattaattttctttgaggtgagagtttcctgcgtctggaaacggaatctagtccttcacacccactaagcttgcactggagcacagacctgtagtctcagcctcacatatttaaaaaaaaaaaaaaacaattccggattttatgtggaggtccttgatccacttggacttaagctttgtacaaagaaataagaatggattgatttgcattcttctacatgctaaccaccagttgaaaatgctatctttttttccactggatagttttagcttctttgtcaaagatcacgtgaccaaagtgtgtgggttcattttggggtcttcaattctattccattgatctacctgcctatctctgcaccagtaccatgcagtttttatcactattgctctgtaatacagcttaaggtcagggatggtgattccccagaagtttttttattgttgagaatagtttttgctatcctgggttttttgttattccaattaatttgcaaattgctctgtctaactctatgaagaattgagttagaattttaatgtgtgagtctcagcctcacaaattttttaaaaaacaattcctagagttttctagaatatatatatatatatatatttatcacttagatgctaggtttttttcttttttttttcttttttttattagatatttatttcatttacatttccaatgctatcccaaaagtcccccacccgctcccccacccacccacttccacttcttggccctggcaagtctgttttgttctttctggtttttctgctctcttcatattagtagcatggccctggtttgcgaatgctccacacttgacctgagaagtggacttacactggcctcttagctaaaataaacagaaagccattccgttcgggtccactgctggtggtcacctcattaccatgcccaaaccatggccactccagttaagatgatcactggccaacttccaaagaaccacatttgtgctgcagttattcattggactggaacaacctcctccccgccccacccccacccccacctctctctctctctctctctctctacctctctctctctctctctgattttaaattgtttgtatagctactttcttgcttacaaaatccaactctgaattgtaatattccatgttggtcaatcaaggctccctgttttgtttgtttgtttgtttgttttatatcatcagtagtactctctatttattttatatcattctcaaaaatatttaaagtaactcgcttccaatatgtctgtaataaccaataccagaactgtaaataggttatgacaataagaaaacatataacccttttggtatttccctgttacagagcacatacatccctccattagagtcactaccctttgagaataccaacctttctagatgctcctggtaaagctagcatgtgggaaacattgctcaaaaatgccagggtacctctgataaaacacaggctggtaagactttcttgagtagcagtgtgatagtctacctgtgttctcaactttggtttccaaagaaattcccatcataatctagtgaaactcctagcagtggagggtatggagcctgaagttgcctcttcctctagccaggtagaactcccagtgaagggattaggataacccacccacaaaaccttgggcccaaaatttatcctgcctataagaagtgcagggacaaagatggagcagagactgagggaattctcaaccaacgactggctggcttgaaatccattccgtgggcaaaaaccaatccctgatactactaatggtcagaacctgttatgcttgcagacaggaacctagcatggctgtcctctgaaaggctccacctagtgctgactgaaacggatgcagagacccagagccaaaagttagaactgaggaatcttatggaagagttgggggagaaactaagggcctcgaagggaataggaactccacaggaagacaacagagtcaactaacctggaccctcaggggctcccagagaattaatcaccaaccaatgagcaagcttgggttgcacctaggtcccctgaacatccttagcaggtgtgcagcttggtcttcatgagagtcttccatcaactaaaacaggggctgtctttgtctctgttgcctatctgttgatcctgtttccctagctggctgccttgtatggcctcattggaggagagaatgtgccttgtcctgaaatggtttgatgtgtcaggtgggcctcactgttctcagaggagaaggggacagaggaaggaggggaggagctgtgtgaggaaggtcagggagaaagggctgggatcagaatgtaaagggaataaataaataaattagtggaaaaatgtttatcaagaatagtgtacacagccacaattaaaaaaaaaaagagccatgaatttaaaaaagcaatggggttatgtgatagggattgaaggaaggaaaagggaggaagaaatgtaatcatagtataattataaaatgctctaaaatttatttaaatgtaaaaaaaacagtaggggaaatcaaaagtgtcaaaagcagaaggagagatgggcatgttgtcatgaatccatacaaagaataggagacatatgaattcaagaatttaggttggatgtgagtagttggaaagaaccatgaattttccccagcagattattgcaaaaatatccaaacattggagcaaaagttctaagtgcagattaaattgtaagtttctccaatattctagaaccagagtattccaaatactgccttcttatgagttctgtttatccaacccaagtaagatccgtgcatctttgcaaagttcttgtcacatctatagtgacaatgagcatacttttatcagaatggcccttatcttcctgggttgccataatgattagaaagttattctgctcagttaaaaatttattctagttctggccagtaacagaaaagtagaaagtccagcaagatgtttcattaaagtttactcaacccaagttggctgccacataatttccactggtttgagaagacagtaatttgggtggatccttgaaagctcaaattttggataattaattctcagggtgtctgtgttggaaagcaaagggtagagtctaacaagaagcaactaggtcatcactcatgaaagctttcttagaaaagcaagttctgcctgcattattgtccactctctggtgtgagccctctcctctttcttgttttctctgatatgcagtaagttgaacttcctctttctacctttgggtgataaagccatagggctctcaccagctgtgagaaagagtattttatccttggacttcccagtctctagaactataaaatataaggcagggggtccactctgttctctcaggcctttgaatatattttcttggtggccatggccattttgaatgaactcaggacaacacatagagttcttgagaagaacatgttgtcttcctacctttggctcccccttgtcttctatgttttcttcatcttttccttttcctctgacaagttgcatctagctctcataattctttaatataacattttaattttaaaaactgtttggaagaactcatacattagtcctgtatttacatctcctttctctccctcaatccttcctccatctgaggtccattacctcttcttctataattatagttacacaaaattgtgtttgtatacaacctcctgagttcgtttagtgtttcttttatgtacatatgtttaggtcttggtagttgggattggataacctattacagaacaccttgctggggaagtctgactttccctacacagccattgactgtgtatagttcttcatctagagatggagccttgtgaaatttttcctacccacattggcatgtagactgaccttgtcattatctagaccttatttagatagccacactgttgatgtttcatgagagcagcatccctggcatgtctagaagatactatctagcagcaggtattttggtcttctggctcatacaatcattccatctcatctgcaataatcaaacctcaggtctaaagattgtattgtagatgtgccagttggggctgaacacctcacagtcactcatcactgaattttgaccaactgtggatccctgtaatagcctcttggatggcatctttgatgagggttgagagctagctacacttgtctgtgagtataaaacaacacaaaccattgtcatgacccttggttgccttgattgcctccaagaacttgaaggtaagaccctacttcttaagtccaaacatacttcagatgaggatatggtggcatcaagctgggactgacctgaatgccccatttctgaggacaaactctcatagtactagaagtaatatgcaaattgctaaggaagaaaagaaataaatattccttcccagctagaaggcctataaaccacagcaatgaccagcctgccaagggacctacagtggggtaatagtgaaactattatcttggagtcatcaacagccatctaattagacttaaagtccacttactagaaggaaactcatacctgatactggaagcctaatgaacacatggctagacctcataagagaacctactatgattttttttctaaatcaataaattatataattattttctaagtgaataattactttattagttctttaagaatatcaaacatgcacaccatatatcatgtcattcctccctcttccccttaacactgtggttctcaacctgagggtcaaatgactctttcaaaggggtcacctaagaccactggaaaatgtgactatttactgtatgaaccataacagaagcaaaattacaattgttaagtaacaacagaaataactttatgattgggggtcacaacaacaggaggaattgttttaaggttcacagcattaggaaggttgagacccactgtcttaaccctcacagttctactcatccactccccatccactttcaacttcaagttcaccttttacttttataacccaactaatgcaatttctgccgcccatgtactcaaggggagagaccatacactgaagcatgctccacctatcaaaggccacacctttaataaaaaccggctgtccttgaccccgcagccagaaactatgaatagctcttcaggctgtgatgggagttcatgaaccctgctctttgctggaatgctgaccagctggatcttaaagcacatctctgagctgctgggagctcaggagtggggtggtcatgtcttctccagaaggcactgtttttctctggtcttccttgacctctggcccttacaatccttctttgctggttcctggaactgggagaagcatatagctgctgcttttaaaactctaaaaggcaagaaaattcagttaaaaacaatggagaactttggttgaagccaggataggtttatttctgcctctacagaatcataaaacatcatacacctgacaggagtgggaatgtgtaattgaagacggcgagtaactatttatcataagctaaaatttaatataaagctactcaatgctttaatatcccatcctaaagggctaagcactatgtagtgctagatccttgagtagagaacaataaacagagaagacagttgacgtacatgagaatcctcagatattacccaaatacgtttcagataatcaataactgttggctgagtgaatatgtacatgaacaaatgagcaacctactagagctcattttccatgatgactttttacagtttttctccaatatgttacgtacattttaatcattttttaaaattaactctctattaagaagcttggtacttatgaagattagacaaaatcgtgtgttcaagtgctcatgctcagaaatagcgtctggcagtcaacaaatgttaactagtgattttcttcttttttctagttattctttaaaaataggattatgctgatgccctcaggctcactaatctcaaagtcatttccctaatccactaatgaaaagagatctggagttgcaatcagttcctactctgtgcctttaactaggccacccacaccaaccccttggtgctggcaccaataaaatatatgcaaaatcctaaatattttttcacttcttcctctgtactgtttagttagccccaaactttgggccaaatctaccatgtccagtcagcacttgtctactccctgttggacctgatgtctgaactgaatttacctcatttgattctgttctttctccttctctcttaatcagcccagtgaaggttttgtaatttccttttggttccaacaaggctcactccattaacccaagttttgggatttgcctctgccacatatggatcaaaatttccaaactgcagttggcatgagtgttgaaacttatccctcaaaactaggagataggtctgatgttctttgtgtttctgtatttcaggaacagaaggggggaaaaagaatttcaccaagctcagatttccttcttttatttctctgttagtgctctatgtgactggctgccccactgaatctgttggctctgcctcagtctgtggttctcagacccagctactcaccaagattatgccacaaatgatttcttggatgcatgtatgtgttcttccttcaagggcttgtgttttcaggttgctatgagtgactagacctgttgccagaatgcatgaatcctctctgattttctgagtatatccgaaaatttattgagctaatatcaatagataaggcacagctttggtaaattcatcagttacaatgacaccagcagctctggatagacaagaaatacttgctgtctttttcacctctgactagtgggagcttgccatgcagaatctcgtctgttagttacataaagaccaaaactgtgagctctgtgctcctgaaaagataaaattctggacttgcttgcttcatgacacactatgcagaccgtgtctccttttatattgagaggcaaaatattgaacataggactccatgtggaacctaataaaggcactaacaaaattacactttccactctgtgttttatgccatactcctaacattgtggccaaactggtcttcaacgcttttactcaatttactcaagtgtgtgggtggggggggggggtcattgtttcctgaatggttgaattttaaaaacaaatttactcaatgtattttatcatatttctccctccccattcctcccaataaccctctttcctaaccaacctacttcacttttttcttgcttaaaaaaaaaaaaaaaaggtacattttgtgtggtccacctcttcctgagcatggggccttccctggactgtggtcgatatgcccagtgtcattgcattcatcgaaaagaagtgatgtttcctttccctcaatgactgtcatttgcaaatattgttttcgtgtgggtggtacactgtacccatttttctttccccatacactgattttgtcctgttcgaacttgaggtcttgtgcgtgctagcaccatctctgtgaatagccatgagcatcagtcctgttatgtctgagaaacgctgtttccttgaagtcgcccaccacctctggcttttaaattctgcctctacatcaattcctgagccttgaggagagaggtgttatgcagagattccatttaggactgagtgctttaatatttctcactttctgcaggttgtccacttgcgggtctctgagttaattgccatctactgaaagaagttctctgatgagagttctgtaatacagtgagctgtggatataacagtcatttattttgttagaggagttattctgttgctatgttcatttaggctttcccctaggcccatcatctagtcacagcttttgaacctcattaacagtgctgacatgtgttccatctcatagagtaacccagaaaccttaccaaacgagtagttggttacgccaatagcacctatgctactattgcatcactgagtgtatcttgaagacagattgctactacagctctcagggaacatagctggatgagacttaaaactgcttttcttctccagtagcttgtattatatcatcacccagcacgatgaatgctagtcgtaataggtcaaacttctagttgagtaccaggttggtttctccatgttcaataccataagtgtgtggtgtcttcagtaataatctcttagcatcatattgtggtaggtactcaatatcattggcaatactttgtaatatttaagggtggtctgtggaactgtttttgccaatgactcaaaaagatataaccactcccaggtataggttttatggtaacatatgatgtccagttgagacattgtctcccccatcctatgataactccatttaaattccatttatatacgcatatattttaggaagcatctacaggaataggcttctgtatggcttttcaaaagacctttagggtaagttgtcccttcccatggtcccttctctactctgtccacctatcaccctctccatttaatcctcctattctaatttcccttttattgtgtggtaacaatatagttatttcccattcatggtccctagaagatcacctcctccttcatcctagctctctactttctgtttaaccttggttattctgatattgaaacacatatatctaaaagctaacactggcatatgagggaaaacattcaatatttgtctttctgagtctcagttccatcactctgggtgattgtttctagggccatccatttgcctgcagatttaataatttcatttttcttgaaagccagataaaattttattgtataaatgtacctcatttacattatccaatttaccagacggtagacttcaaggccttttccaatttctggccattatgaatagaacagctatgagcagggggcccttttgtatatgaacaagagttttatagatggatcttgagatagatcaatttttggcttttgaaggaacttccgtactgacttccatggtggctatataaatttgcactccttccacaatgaataagtgttcttctttctccacatccttgccagcatctgctgccgtttgttttatttatcttgcccatcttgactggaataagatgaattctcaaagtagtttttatctgcatttctctagtgattaaatatattggaaaatcttgtttctcactcagttgtgtattatcttttgagaactctacttctgtatcccatgttttaattgggatatttgctttattaatgttgagggtttttttttttttacttctttgtatattgtagatacttatcctctgtaagatagataattagtaaagattttttcctattctgtagctgatgctttactcaaataatgttgtctagcatgtagaaactttttaacttcatgaggttccacctattaactgttggttttaaaccttgtgctatccagatccaggccagaaagtcttttcctgtgtcaatgagttcaagcctattccttaagttctcttctgtcattttcactgtattttgtcttatgttgacgcctttggtccatttggagctgagttttgtgcagagcaatagatatagatataggtctgtttttttttcttcagcatgtagtttgtatgcagtttgactagatgctgtctttttccagtgtgtgtttttaggcttctttgtaaaaaaaaaaaaaaataagaagaaagagggaaacgaaaaagaaaagcttttcatggtgtgtatatttattcgtgcattttcaatgtctctgattttatgccaatgctatgctatttttattgctgtagttctgtaattaatatgaaatctagagaacctacaaaaaatgaacatatatgtgcatgacataccaaacttaaatcaagattaataaaacaacttaaacagactcataacccttagtgaaatgcaagagtaattaaaaatctcccacgtaaatgaactccaatgccaaatggattcagtgtagaattctaccagaccttcaatgaagaactaacaccaatactcctcaaattattccatgaaacagaaactgagggaaatttctcaatgctgtttctatcaggatcatacagtcacagataagcttgtcttttaagagagagcaatgaatgagactatgcagtgttattgtgggcagggctgagaaataagaaatctgtcacaactcatcaacgtgaaaaagaaatgaacaagaatgaatttctctggggctcagtgaaaggctgaaccatggaggaataatatggctggagagacagaccaccactaaaactaagtcacaggaaaggtagttgtggaaggaaagagggcccttgcatgcccatttcccattctctacctcatgccccatgcctctacctctgcctccatctccagaaggttgattcttccagaagtcactcttctgaaaggcaagagagcctagcagtcagaaccatcaaacccagaacagaaaaagaataagcatggaatcaaggattgaccgggattaagtggcatgccagtcatctgatacatattgaatgaataatagaggtgcaaatgatgagagcccaagacccagcatgcagtaaaggctttagcggctgctgaaactacaattcccttgctgtctctgtgctccgagtctctcgtcagtactgtgtggtatttcagactgtccacttcagtgcagcctctgacctgtgtcttgttgcctctgtgactttctccaccctcagctaatacctcttcatttccaacaagaatagagagtgttgatgggaacagggaggagcatgggttgttccgaacagagttaggacattatcaaagagagctcaaataatttccagaacctaaaacacattctagaatatttaagagattctttttctttatcttttttcttttttaaagaaaatttggtgccactgtaccctatggagaaaatttggtgacttacttctaggaagcttgccccagacatctgtgtcataagctgtgagttcaccagacgcctcgttaccaaacgtcttgtggatgaacatcttttctattcaaatagctttcatcctattatgggctttgattgaagacacaatccagctatctagtcagagcagcaatgttgacactgcagtgactgtgcatgagtgtttcagagttatgaggacactggtggccaccatgggcctcctgctggtcaccttctcctccttagctgcattagcaagaacatccagcactagcttcctcaagggatcattcctagtactctggaatctgaatgctaagaaattatttgaaagcctttttggctggttccactagccagttggctctcagatggaattgtgaaactaaattggacaatagctatgaatttatgttcataaataaaagacattttaggggaggggatgtcttgcttcttttttgcgtgtgtatgtgatccatgtgcatatatgtgtatatggcccttgtttatgcatgtagaggctaaagattgatttctaatgtcttcctccctgtatctgcaccttatgtattaaaatggggtcattcatttgaactcagagtttaagtaaatcctcctaatctagctatatttggctggcctaggtggccagcttgctacaggggtcctgtctctacagcccatgtttgctgggatctgggatcataggtaggccaccatggttccccaggatgtacatgagtgctggagatctgaaatccagtctcacagtcacatggcaggtgctttatccactaaacagtcatcctagccctaaaaaccaggtttataaggcagtttatgccatatagacacctggtttgcattcaaatgttgaaagagttcctttctatctaagatcagcatctccaactcttatctactttgcatctcttaaaccctaaccaatgggaaacaagagtctggaatttcatccaaaagcctagagtcagaaatgctagatgggataagattgaggctgtgacacctggtgtaagtacatcccagaagacaaaagccctcatccgacattttactgagtcttccacttctcactctaaaaagccttctcctgccaaaggatgtttgaaccactgatgaaggatctaacttgagcttcacataaaagtgagtctcactcagacaagttcatatctgtattcctcagtaaatcccacctagggcctccaatatattccttatactttaattccagttgggacagctggtgaaagtgatctatgaactatagattagatactgaattaatattaatttcatgacacacacacatatatacatatatatattacatatatatgtcaatggttttgtatacacacacacaaacacacacacacacacacacatatatatgatgaatgccccattcttaggagaataaactcaaataattagggacaaaaaagaggcatcgtaactatgacttactctctgatgacctggggaaaatgtaatttttgttacataaaagatataggatggtgaataacatattaataattcgtgtgtttgtgtgcaatacgtgggatttatttttacaactttttttccaagattgacatgacttcataatgaagttgcaaaaacaagtaagtccagcttttctaatgctcatctatgctctgcaacacaggaagctagaaatgctctctcctgatttgtcctgtttgagttaaaatgagtcatcttctctttcagctaaagaacgcttctctgtggaggtgagcatcgcagatgttttgcacatgaaccctgaaggtaaggagggttttaccgagtgcccacataattgcctcccattgtccctctcatacagacaagggcagggacgtggctatcttgattctcaaagagcatcatctcaaaccatcaatactcacacagagcagtccactatcctcaaaagggggggggggggaatcttcaatctctgtttcagaaaacctgatgctcgtctccttttcttgtttttctcaaaagcttttcatggttgaaatcccctagctgtgcaattagatttttatttcctctttatacttgtctgtacttgggaggatttttttgacaatgtctgggttacttttataatcagaaagagaaagattgcatcttcttttattttttcaaccagctcaataccaattctgctatcacttcctgagacatctctcggcctctttaatattgtcactacttgggcctgatccgtgccagcctatatgacaatacttatatgtggtgggctctcagttttcctcacctactaataccaagggagccctgggagccagaacctgccagcaaataggtcatggagaaatcacccacacaaagattgcctctgcatataccacagtcaaagatctaggctacttaagaagatagcagattgcttttggtctttgagacctttccttcctgctcttcaagagaaagtgaaaaactcattaagatagaaaactgactattattattagctgaagaaaaatctaagtgaaacgttcctaagatttctttgagccaccttgtgatggatgaatagtgattctcctttaagggccatctttcactccagtgaaggctggcctgtcccatggatcaaagatgctcaaagattgtcaagaccttctgagtcaaagatctttttgtcacaaagactgctctctggtagtatattcagcaacattggaatagaataccactccaaacccagcttcaacaaccaacagtgtctagatgttgcttaaggtcctgggaaggacaaaaccacccaccctgggtagtgacagtaatgtgttcagacactgcctgatgtctcctaagtgaaacaaaaatcccttctatcaaaaaagcacttctctaagttacctaagccctgccaagaccttctgtttttttcatttaagtggattgaaattcatagtgtacagagtggaaacaggaaatgtctacaaaaagaatgccataaacactttgggtataagaaatctctgtggcattaatgtcattttctagacaatccattaacataaggactggtgcgtcaatccagcaagagttctatgcatttcttcctactttcttggcttctaacccttgagttcacatggtacttgaaggatagagacagattgagagtcaaaacattatgctaagttctttagtaatcttttgccatgtggattaggaagcatagacaactggagtctgaactatgttgcaaacacaagagaaatttgcctgcaaattacttttttttttacttttatgtgtacttatttattaaccacatgtttgtgtaaaaacgttacctctgactgacttttcaaatcttttaaacatcgaggcatagatccttaactaaaattcatcttttccactccaaacagtacacagcaggtgaagttttggtaacagagagatgttccagtggttggaacaggagattgaggctccaatatcacatcccagtacacacacatagatatctactgtgcttgctcatctctaagtacccttggggcctttcatccctctggttgaccttcttccctagcatctaccctagtctcatgtcctccaccctttacccaacctggatgtggtatgcaaagattatactcatgccagtggatatctgtgaaaacacaggcagaaacttgaaggcagttaagacaagtcaagacacacagcaacacagctcttcttcaacatgagaagaacatctagaaacaaatgttcataaaagaaggcaagagaaagaacagctccctgaaaaatttggattcaaattaaaagcagaactttaactcttgtctaacacccggaaaaaaataccacagtccattgtgagctctataagctgctttctggcctccagcttttcaattatgatccactagttgtaatcacttcagagcatggcaaagcaaagcaccgccctacctggcaccatacatccttttacaagaactctggcatcgtccaggctctgcccattccatgtcttctgcagctcctgtccatacacttgtgactttaaatcttgacagatctgtgagatataaagacacagaataatccaagagcactgtggaggagttgtcattcactaggtgtcttttgatgctcatctaaaggtcttcacccattatctttgtatacatcacatgtttctgccaccatccaattcttgccacttgggcttctactttgactaaaatatggtatcattcaaaatctgtgtgctaatcttggcatatagacatgtagctcgctgatacatttcttgcttagtatgtgtgatactctgggctcactctccaacagaagacagaacagaaagacttggagtgttgcctatgagggttaataccttagcttatgcatcatatttgcttatgagttggactttcttgtccacctgggaagactttgaacttggaactcaatggagacttagttttgtttttgtttttgttttgttttgttttgttttgtagtagagaagctgagtgcactgaccctcattcactatgccactagccccaaataccaatttaaatataagcctgttgaaattaaatattaaaaattcagttcctcacttatattgaatccactcccaatgttctatagctgcacatgcttagtggtcatgttattgggcagggaatatcaagaatacttccattacaacataagtttctataagaacaagctgaccatcccagtgaggagctctgggaaagtgataaagctcaaacagacaggctcagcagtgagggagagagatgacagaacaggattctaaaaagaaagtgaaaggaccagtcaacgtacttcaactaggtcaacaattatatcactgatacccaaccatgaacaaatgtacaactactctaccacaaaacactaggaaacaaagaagtaaccatctttgagatggtctttgagacccattttctcccctgtctagtctttggagtctgtgaactcattgtgaaacaagaaacttttcttctgaatccagaggcaagaagatcctaagctgtgctcacacattgaagccaatgaactcccagtcaatggagaaagcaacactctggtagccatatacaaaagcctatttagagctaggattattcaaaccaaagaaaacaatacaaggcaaaggtaccatctctctggggacttttgactctataacaagtccaaggaacacaggggtttccaggacaattattgtccctgtaatggagcagatagtgtggtcatggcctcctgctgacagcagtggtttatccttacctagcacattgtcaacaaagattacttccacaaagtcactcatcttagtctctcctcacagagtcaccgagggaagaagagcagatgtggccctctgtactttacatacaaaagagtgaaggcacagaaagagaatgagacaagccatagttagcaaggttggtgaaattcaggaccaacaatagaaaacagccacctaacctgtctgcagttcgcaactcctctctctggagatacaagtcacttagcacctgttcaggtccctaagtctgtcatctccaaggctatgacctcctcatagataatgctgcaaactcagcttgtcactccatccctgtacagagtccccagcaagctcactgatggtacctcatctactcaaactgctgtaagaggggacagaagcaattgttactaattctgttgctgcccttctcagaagaccccttctttcaagcaaaaacatacctagtaattgcagaaaaaaatcagtgtttgtctcagtgtatacactaggtctaccgtctatcttcctggcaaaagtcaggtggaaaatgctaccccccaaaatactctgtctgccttgagatactcttaatcatggcagattttatttctctagaaaactgagttagaatgtttccattcatatgactttcaatagcctgtaaccaaatatgatatattctcacacttgaatgaactcatcattcatgatgtctaatagtcatttgcattcttggctacatgaaagattggattcgatattttcctttagcatgcaaagatatgcagagtagatatagcctttatgtctgataaactgtaaacacaaaatccaccactgactaaaacagtgaagaggaagtaagatctaaggctgtttagataaaataatattgaagatggcaacaaaaattaaaatgctcactttaaatgtttcccaactagctgacacatccagcattgtttggcttggaaacttgacaaagagcaaagagtgaacgaataaagggcagatacacatacagaaaagccaagttagccaggctatgcacactctaaaagaacagcactgtactggctggttttatgtgtcaacttgacagctggagttatcacagagaaaggagcttcagtagaggaactgcctccatgagatccaactgtaaggcattttagtgatcaagggggaaaggccccttgtgggtgggaccatctctgggcttgttagttttgggtagtcttggttctataagagagcaggctgagcaagccagtaatgaacacccctccatggcctctgcatcagctcctgcttcctgacctgcttgagttccagccctgacttccttggtgacaaacagcagtatagaagtgtaagccgaataaaccctttcctccccaacttgcttcttggtcatgatatttgtgcaggaatagaaaccctgactaagacaggcaccaactccacagcaccctggaacctcagcgtgttgactctgtagagcacaggagggagaatgtgcctaatctcagtaggaagtcttactagctatgcaatctcagggcaaaaacttccaggaggagaaattgtgttgctagtttttgcccacactggtcagttggactgcttgaacacactttcaacatttgcatttgaaccagaggaaagctttaccatccctctaaggctccaactaggcgtgcaatctttgccattcccatgcatctgaggagttggtctttgacatggctgtaaacatgtcaaacaatacatattcactcagaatttcatctgttcttgacacactcaagacttacgtgtggctcttcatacctagcaatgcaccccttgccttccattacagcagaaccccagtgtttctcagtcggcatcaacctttctcttcatctaagccattacacgttacagttagactactgagctagctatgtcaagttttgctatctgcccaaggcaaatgggccatgctctggagattctacttcctcccagggctgagtaagtccagactctaagcttcttctgcatctttttgtggcatgaccccagagaggatacttggagcagcaagccatagcatgcctggctaaaggtggattaaacactgggcatgtagcactttcctaagaaattctgggaaaatcagttttaggtttgatttagcaggtcatgataacttcaaggaaccagcgtcaggatgaacggtagaaggggggctcctctccctctttctttcagcagagagggaattttctgctatgccttcatcactagaatttagtgggatggccattcctaaggctgcagtctggacaaaaaaaaaaaaaagattacaatggccctgattagcatagcctgttacttcctcatcccctggggctggatgcctgatgcctgactggactctgcataaaaacaaagggagaagtagttgttggagaagaaacttatggtatctgccaggctcattgggtggataggactgtgtcaaagacaagacaaggaagtttgttctcaccagagaggcaccctccacagggaagcagcgtcatctcctcaacaaggtcagatcatttatgacaataggcatgacacctacagagcatttttttcctacacttgtcatttatgtgctttactggagactctttgagagatggtatgtgtacactaaaggagttctttctgacaaaatttattttatgtcctgttcttacatctaactatacatagctagatgaaaagatgggtggatgaatgcatggatggatgagtgagtgggtgagtgggtgggtgggtggatgggtgaatgggtggatgagttggtgagtagatggatggatggatggatgactggttgggtggatgggtgggtggatggatggatgggtggatggatgggtggatggatgggtgggtgggtaggtggatggatgaatggtgggtgggtgggtgggtgggctgggtggcatgcggctgggtggaatgggtggatggatgggatggatggactgctaggagtggatggctgcctggatggctgcgatgaatgctgggtggctgaactactccatccacgaagactacaaaggatgaacgaacaaagcgaaagaaagataaaacaccnnnnnnnnnnnnnnnnnnnntttttttgatttctttgtttctattcattcttatattgtcttttctttccatgctgttttcgtttgcttcttttctttttcgtttttctcgttcttttcgcttttgatttttttactgaatcgcatggtctgtgatcgtttggtttggactgcatttgttgtattgctcgtttgttgactgttgattgatgatgtttgtatggatgatgttatgtctggatgtattgcatggatggatggatggatgatggatggatggatggatggatggatgggtggatggatgggtggatggctggctgggtggatggctgggtggatggctgggtgaatggctgggtggatggctgggtggatgagttgatgagtagatgggtggttggatgggtgtatggatgggtggatggatggatggatgactggatgggtggattgatgggtgtgtggatgggtaggtggatggatgaatagttgaacatttaaatcactaacatgggtcaatctacctgttttctaacctgccccactacactcacagctggatctttatatattcactcctttccattcccacccaacaagtctacaatgaaagtattcactctattccctgaactagccttgggtctggttgttacctctctgactggttggtaccttttctgcccagaaggttgcttctgaagaagaacaagatggaaaagggagaaggggaaagcaagtaattatcttggtagatatagttgcccagatgtttgaatgcagaagtaagtctgaaagaacatcttgttcatgagtgataaagtgtgactcagaaaagtagagacaggttgtgctcctaaggggagcacagagaggagggttgactttgggactggttctgagcattatgaggtgggagagatgtgtaggctttctgtgttcctggcccagtctgtgaacctacaattactactatcctttagacttccagctcctagtgctttgtattacaagtctgttgagccagaggaaaatttacacagagaatctcacaccaggagccctgctgaagtttcttctgaataagatggcctggtccttctcggggcccctgaagaagatattttctgcaaaactgccattcacctacttgtcagaagctgaatggcaaataatgggttcctggatgttttaaatgcactcagacacagtaatgcaattagggaaagtaggaggaagtctcgaaaacaactgagcagccagtgggcatgagagctgttgaaatccttcactctagcttgagagataggtacatgttcagctacaaaaatggttcatggaggttggttctcagccactgctttactcattgccagagacacagaggtccgatactctatggtagcctctgttcacaccactgaatgtcaggttttccttagcgagctggttttgttgcattaatgatggtgttcaaatctgcctcctcagttgcaatagcagtcactttttatttcgttacattagaaaagtagtcattacccactttagaataatattccctcccagagggattcaccatttctgtgttagcatgaatctgtttcgtatccactgtctgagcacccgtgcaaagacatttgtgagacattaggatcaggcatgtctacttcctgtatctaattattcctgcacttcacctctggaagtcattgaaattttaatcacattatgtcaaggcttaaataatattccactgttgtctatgctatgatctggttaagcagccctttaggatctggtgtttagattgttttctaataatttgggctttataaataacactacagaggtggactctctttattctaatgttttgtgcacctaggttcactcaggttaaagttctgaagtgtattttctgattcaatgtgtatccgtattcttgagacttaacatatgagaaaagttaaaccaatgtacactcaaaccacaaatccaaatgtatttatacactcagtaataccattctgaaacctccagggttgtaaaaaaaaaaaaaaaaaaaaaaaaaagagtaaaaataaaatattttatatgaaaatattttgaaaattaaaattccattaaaataaacattgtcatactatctatttttaaatgacacaagtagaagatgtcagcttctttgatgaaatattgtggtgttaatagcctttttaaagtcccaaatccttgctaacttacctctctacattcggcagacactcagacactcaacacaggttatttcctcagaaccatttactgaatacccatagagtatagagctttgttttaaatttgaggattaacacacacatacacaaagaattaatcaatgagcttctagtctagcctgaagagctactagagtggggaattgcataaagataagtcaaaatcattatcaggactaccctgtacaacagctttgtgagacctaaagtgtctgctggatgggagatgggacagagaatcaggaggtatctggtctttccattggatgaccatgaacctatctttgctgcttctaaaaatactcatattttctagtagccagagttctggatggaaagagagacatcattttgggcaaagacttattttaacagtctatatggtaggattaataagatcccaatgttaagtatcatctaccattgctctagaaatcaatagagctttgtggtgaattaaatacaaaaggaggggctgactatacaactgtttggaaccatagtaggacgcagagattttagggaagtgtgagggaaaataaggagggggggggcgcaaatattgccactgttggaagaacaagacaaggaattttgccaagtatctaacgtgtggtggccagagaacccttcagctttgtcaaactacaaaatccttgctctttttaatgcttggagtgacaagggtctgagtgtagtttccagatgggtgcctggtgagaacgaaggccacctactggaagctgtgacacttcaatactcacccttcattctgttcatgtgtaagctctaccatggactcagaacagtggtgctgaagctggaaacgcttcccttgaactgtgcagggtataaactgcccatgacctgcttctcttctcattttaatctgatggatacccaggttcccatgtgcttggcacatgagcctacagttttaaagaacaagtggggagtgtaatgccatcttttagaccataaagggcatgcagaggttttttcccaaacacccaggtatgtgtgagccctgccacttaaggacacctaagaaaagcatctcaggctattatagtttcaaataaattgaccattgatagaactaagagtatcatcaaagcgaccaatttttctcccaaatcacattggtttgataatattaaatcaatttctgtttctaaaactcagctgacagcctttggactacactggtgcctgccaggctatggactgaaatctttatgggtgattcccaagtagagtctttgtggaaaacaggaaaattgaactaacctttgagtattgacatcccaaactattatccctttcatagtttcagagagtagtcgttataaggcatggtgctgattagatgttatggaaacaggcagtcattttattcttataaagcaaagagtaacaatgatttgctggggattgcctggtcattgttatggtagaaaagtatgtagatgtttacctaggcctgttctacttcattgacctgggaaaactactagtcaaatggaaagtggggccccgatttgcttgataaatagcagtgtaatggaggacctaagaaatacagagatacagagaagtattccttccataacttagagccacacttgagttttacgacattaagcatgctctgttttttttctaattgatagtttcttttgacatgtttttatttactctttgaatttttcatataatatattttgatcacattccctctcccatatcctcccaaccaatctatctatctatatatctatctatctatctacctatctacctatctacctatctatccatctatccatctatctctatctctatctctatctctatctctctcaaaataaaaaataaaaaaacaaaaatcaaatccagttttccttggccaacaactctttgacaggggacctgttttgttgcttttaccttacaccactacttaaagctcagctaagcagctcaactctctggaacacaaatgagatccagaaagcaaaccaaatagacattttgatgaagtacatgtaatgaaagccatttatctataagacaggtggaaaattcctttggtcctccctcacaacttattgtcatcatttaaatgacttcaactttctaaatttttattttcatgttagctttccaactttgcagatcaaaagcagcgatggaatgaaatggatctgtttaggcctactagaagagagttagtagcaaaaacagctattaactattaaattaaaatttttagggagcaaaaacaatgaaggatagaaaggtcgggagaagaaaaaaagacagctaacaagaaaatagctaggcactgaggatccttgtgtcctaggtatctgatttaagggtctttggtctgtatttactctcggtatagcatcctgtgaccatgccactcactataactgatatgttcacaaatgatatcagtgttctgattaagaagtcatagaagtaaataatatttacatttgtatccaattcattaaaatattttttatctgagaacatgctttacatagctagatacatagctaccctgtgatgtgttttcattgaaaaatacacattttttaaaaatcattttatttcatttgaagattgtacactcgaagttttgtttgctgctgaaattccacacattccttcaattttcaataattatatttcttatgtaatttggctattagccagatgccctggagccaaatctcattgtatgttttagtacatctgttggcgccaaatctcattgtatgttttagtacatttgttgctgagttcagtttaatgcacatgaaatggtattggaggaatgcacaagaccttagtcacttgaagtgcatcttaataggaagaaagaattccctgattcaagggtacatgttattgctcctctccttacccccgtggatctgagactgtgagaaggggtgaaaatattatgttctttatggttttctataagtgagtcagtccgagtttgtaacttagtggtagattgctcacttcaaaatcctgacgctctaggttcaaaccctggcactacaaagaagggagaaaatggtaaagcaaccagtcattcagcaagtgttactgcaccggtgaatgtgtgcaaagtgacaacgcgaatggtatagaagctgaacaaaatgactttgataatagtgttcacagtgacactgaatcagcacaccagacatcaaaggtttacttactcataggtactacttgattgaatactgtagttatcacccaaagtaagcagtaatagccagccatttccagattattcatagattagtcaggctaagtaaaaccaagcatttccgatactcagtctctagctacaaagcttactaactggattgttacttctcagccctataaagttcagtaggttctgagtggaattctagagcttcccttctgttccatgatctcttgggtctacaaactactacaggccaggagagagaaaggaatgtgcagacaaggatgtggaggggcagagtgtatttatggaaagagctttaaaggtcaagactagaccaaaaaaaaaaaatgtagcctttctccccattctccaatgccacagctcaatcatctgaccccatgtaaccataaaaggagcagttagaagaactttagctgtagagagaaaggaagaatagacccaaactgtggcaggttctggatccttttccttctcttgtgagggactctcaatatcctcactgaagtggtaaagaaaagtacaacttagaaagaagagataattttgacatattcttggggtgaatttcttgttggacttactagttttctcagatgtaggtacagctcatcctcagtgctctaaagatattcccatcagacacctggctattttcccattgatgctcaaaggaggccatgggttactcaaggccacacagtcactgtgaaaagggaagaactggacctccctcacactcctcaggcttagagatgaacctggaccagattttctcaagtctttggtttcctttcagtgcattttggagtttttggattcaaaaactccaaaaatctcaaacaggcagccagggagtcagtaaaccgataattaatcttttttattttcgttttcaattttccatttacttccaagcttgtttcaagaaattaagaaacacacaaaaatagataagcttgttaccaacagtaatttgtgtgtactcatgttttaaaaggaatctaaggttcttttctgtttaattaaaccgcatgcacacatacacatacagctctgtaaaacagaattttcttctaacaatctggcaaaacatatgtctcctcctactacagtggcctcttggtagtgacagcttgccatagaaacaaactacagtgagatttctgtgacttgaaacaacattcatttttttaaaaaaactctttttataagaggcagcaggctgactctggtgctgctgagattatctgggctcctctgggctctggagaactttttgccttcttgttttgccacccaattgaggatttattatcttatactaaatagctccataacttagaaaagaaaacctcagccacgtcctgtgactgtttctggatggatggatgcagccaaagtatcacccagtcaccaccacctttcaaatggatgagtctaaagtaactggattgcagtgtgttccctttccaacataatgactcagtatgccttataattatacatgcttccccatgactcggaataagaaaatatttggggacaataatccacttagcctgtcccaccaccacctgaccttcattcatcgaagtctcaaatgtggcatttctcagagaaagcagcctctctttctctttttctctgtttacctctaaatggagctctctaaattcagcttcaatgtcagtcacagaattacatttttcaaatgtcccttcctgggccctacatccagagacatatgacattaggagatagtgtatacagaaaagtctctaaagacaaggcccagggaatgtctactactataaaagaagaactactattggcctcacacagtacccagcattagagccacctttgggaagttggtttgagcatagagacccttatcaaaacaagggaaaacagccttggagaagtcacagtctgtggtagcaaggtcaccttacctgttccctgctctcataccaggtacattttgtatgtctaagatggggctccttaaaggtaggatcagtggtcctctgtagatatataaagtagaaagcatgcgataaatatacaaattctggtgttcaactcctaagatcttcttcacccactagctatgtgatcttgggcagttcatagaacatgtctgagctgcagcacccttatctgtgagatgagaataataagggagatagggtcctagtggcctttaattaataaagatactgaggaagccatataaagcacaaagattacaagttcaaagcttgccttggacacagggtaagttggagatcaacatagtcaacttggcaggactatctcaaatatagttggaaagtggagtggagttatacctagtaataaagggctttcttagcatgtgaagccctaggttaaaaccttactaccagggggaggaggaagagaaaaagaagaaggggaaggtaggggaagaggtatagggagagagaggaggagcagaaaaaagaagaggaagagacagaaaaggaggaaggtagggttgggttcagactcaaccccactcttgtatattatgtatacataacctatacacatcttcctgtacactttaaatcattccaagattatttatgatgcctaatataagctaaatgatacattcagttatcatactaccctatttagagaatgacaaagagtcatatttggttacaatgcaaatgctttccaaatgcattcagtctggagttgatgaaactacagatgcagaagctgtggatgtggagcgcccaaccatcttccgaagctcaggggacacagtataggaatggaaactctcccacactgggagtgtgaatcgtggtttgaaagccactgcagcctgtggagctagctgtgaaacattctatccaaaacatgttgcctttgcactgttatttattgatggatgatctcatgagtaactggttcctctggacctcaggccaacatggattttctaacatctgtccaaactctgccctggacagggagaattaacatttacccaattcctattctttcctttaagccaaaaaaaaaaagctgattaaaaacaaagctctgcagtaaaaagaggcagcagggactctaagttgagtgagttagtgtaataggagatgggtgtgatgcctccacctttgggtaagcatctacatgttaaaatcaccctagtgcagaagtgaatacagcactgaactgtaatttgctacatctagctttgaagatagaactccctgggacactactctgatgttggaccaacctgtgccagctcccatttggaccgcactgtctctgctagttaactctacatcttacagaatgcagctgtctgcatacccagcacatggccgtacacagcacagcttcctctcaggaacctcttcagtttttgaaacaggaagagaatggggtatgcaaactcagaagtgaatgttttaaagtgtctccatagctattgctagtagctttcacacaaccatgatgatctagctaaaccactgagcagttatccaaatggcagccaacttaggatggtgcacagggagacagatcttctggaaattttaattgaggataaattaccaccctgtggtgtaagcatctttgcgctagattcattttaataaaagaaatgcagatcccttattcctagctggagttattgctctgaaagccaacgtacaacaatcttaatcttcagcatggtgtgaaacagctaatcccttctgttcttctcttccccctgggaagattatgtcttttgttttcaaaattaaatgctagcattctgtattggaaagaaaagtcagactcctgagaatcaaggggcacatgtgaggttcttacccagttatttcaccctctggccatttagtactgggggcaattgaggtgatccagtgagcagaggagcccaaaggatgtacctagcagtgcataacacttaatagataaatttatttaatattagtttacaaattatggaggcttttttacatttgggagacagaaatgttagaaatggatttaggttagtggaagaatgtatggctggcagtacactcagtgcttatagtaaagaaccattgttggtgagctttatgtgtgcagggctttcttatgagggtcttgagtgctaccagagggagagtctggtttttaccctgataagttctctgttctctgccacattgccctacaacgttaaatgtacaggtagcaagcgctaagtggattcagtgagtttggtttggtttggtttggtttggtttggtttggtttggtttggtttggtttggtttggtttggtttggtttttaaaaaagcacatgaattgaaaggaatagtgttagggagggttggtgataaattggtggggaggaaaagggggcatctttgatcaaaatgtattgtatatgtatatgaaattctcaaacagcttttaaagttgtccaaaaaccaaaaacaaccctaacagtagaattaatgtagaaattacagtatcacattcagcaaaatataaatgaaataaaacaaaaataaattatgtgaaactacatacaacaaccagaatgtatcatacaacaaggtagaatgacagaaactggatacgcacattcattaaatgcttatgatgcgattctattacaggaagttgggaagtactgttgggcatggggtagagatcaggaggaggcactggttggatttctgggctactctttgtgatcttttgcaacttaggtggaagcatagagctattcacttgatgataacttattgcaaaatacctaagatttattcttcttcaagtaagtcttaaattgtctttgtccatcaaagacaaggtttataagagctaaaaagatccttagacattctgccgagcttactgggaacaattctagggttaaggagactgagtcaaatagagagaccacagtgacaaaagaaaaaaaaaagcagcatggagaagaaaactggaagtatctcctagcaccaaaggatggaaacaaatcccacatcatgggagagttaagccttccttcagacttttataattgataatctcagtggtgggtgggccaaagcatgcagagaagtataagcagaaaggactacatcagaaaagctaacatcaggcagtgatctggtgagagttcagatctgtcctatttacctcttgaaggtaatactgtctcctattatttgggatgctttccacaatgtggatgggagggaatactgtaggccattggaccctgcctagttttccatctaggaaggagtcattctaggttcccaaaagaatgagccggactatagattgcaaactcagctgttgacctcaatggaagagggttggtttaatggaggacagtaataaagaggggcttctggaaggagtgggtctaagtaggaccactgttgatgcacaaggcatacctaggggaaaatggttagttttcttggcatttgtgccacagcaggatggggcatgggaagagtctgaataaggtaatgcaaagtggcatggtgatgagagagtctgagaatccagaggtgagaaagacaaatcagatgggcatggacaaagcagatgaaagttaggaactcactgtaaacctgctcagagacagacttttcacttgtcaatcacagtcatacttagagagatggggatgtgtgcaccctaagatgaccttaagctgagtatgaaaggctcaggttttgctaactggactccagatatttgaagcagttgcactataccatcatgcaaagttgtgggtcctcatcggtattccaaccccaactgaagcagtcaataaggagggccatgctcccttcaacctggatctgcttgcagtgaagaatggattcagaaagataaaaaaaaaaaaaaaaacttcacttagtcttgtgtctgattaccataaaatcttgtctgtggatcaggagagggtgtgctcaatgctaggacaaaagaactatgtactgtgcgatcggggttaacattgagcatagccaaaatgagtggccattttgtttccctctgaaagttttcttaccacatcatggttaccttgccagaggataaggtgaagattgagttgggaagtcactgtcaaaaacgcattgggaatgtgtctaattccttgacacgggcagcttggggcattaggaagtgcatgggtgtgaccagattccagcatatgtagaaaaaagttatctaatgagaacaccaagcatttttacaactttaatgagaaggatttttgatcctacaccagcagaagaggaaatacaaacaaataactaaatccactctggcttctgcctacctggattcctatctgagtatttcatttgcaaaacagtcatagacctgtctggcagaggtttcccgatttcacccacgaagggtgatttatagcatggtgatctcagatgttgttttatgtgatgcccaaaggaggagggaagttttaacacggggatattttagagcaccttcagccaggaagcagaatctgactcccaagccaggctgagtttaaagtatgttcaagatgaagaacgcttcccaggttatacacaaataagatcaacagcattagacacccttaagaacgagtagagccataactgatgacctctgtctaccctagctctctggctcctgcttacccatgtaaccaggtatttttctctccatgggtcaattgctcttgtcttatgtatcactctatagaagggtcagtttcactgtctgtcacaggtatcacacaactcttgatttctcagatgctctgggacttgccagatctctctccctctccctctccctctccctctccctctccctctccctctccctctccctctccctctccctctccctctccctcgtccctctccctctccctctccctctccctctccctctccctctccctctccctcttcctctccccctctctctctttctctctctcctgtcagcgtgtggataacagtctactaaatctctctacactcagtctctgtacctgttaaaccgagctggtggaaaccaatgtctccttatgaggccatgaaaaagacaaaataaaattcaagtgatggaagaactcacaccagtgcctgttagaacaagttcattatttaaaacctatcagaagctgctgagcacttggtttaaagaggatggccctgagagattaaaagaagtaggttagattgagactgtgctacctagatgtgtatttgcaaggaatctaggcaaagcaagcaaaaggtctccagaactttgctgagcccattaatggattggattcagttctcaaccagaacattcgatagaagggcaccgcttgttggtatgtgcgtaccccaagcttccagtgtcgttaaaatgtctatttttgagtgattccacagcagtagtggcaggtgttctacaccttcagaaagctgtccgttgcgtggtatgtatttggcagacagagcacatcccctgatcaggaggatggattctgtgcctctgggggctcatcacacatctcttcacaatgcttgaagagtctatgacggagaactttgcctcctagatgttcttcccttgatttaaaaataaaatttaaaaggaaatgaaaaccatgtgcttctggaaatttatatgtcgttcatcaaaatctattgtttttttggagcactgtctgaagtctaataagactaatgagtctttttttttttaataaaaaaagtctttaaaatctttcttaaaaaggcaggaacttgagaagctttgaaaacggttccaaagagtaaaaataataatattaataaattgctcaaaactctcaagccctgcaagttcaaaattgacttaataccctgaacccaagaggtttgaattattactgttcattgtctcttgttatggggctttacagaagggagaaagaagccacacggagggccactaaaattcattatgaggtttgcttcacagccatggccatatccctggagagttcctgaaccttctcagcctgaacttagacaggaacctccaccctgaccatcccactctcaatctggcaggatcgataaattgacctggtttatgctctggatactggagcaagaaccctccatgaatggttctcctgtggggagcacagtctatattatataaatgggtgatgtgctattagacagctaaacaatcatgtggaaagatgaatgcagaaaataataaaataataatataataaaataaaataaaaagccaacagcctgaactgtcttcctgaagagacttcccctgaactctctacactgttgtctgacgacctcttgtggtgaaatctttgccagcaagtgtgaatcagggcttcttagccaagccatcccatgttacattttactagattctcttcccactgttttgtcgctcacattaagcaaggagcaagaaccagttgcaagcacccagaataaaagtaaatggtgcatgtgcctgagcggttgtcatttaacaaatgtcacctggtgctttctcttccagggagcctctgatctattgcctgtagcaagaagaagggccagcctgaagcaaaacatgtcatctgcacttgcttacatgctgcttgtcctcagcatcagcctcctgaatggtaagagactctcttcttgctctccttgcctgaagtgtttatcgggggggggggggggggggtggagaggctgtctctgtctgttgcaatgcagctgtgagaaaggaagacgtctgggtcatgtgctgctactaaattatttgccacacttctgcattaaaattaatgcctgatcttatcatgcaccccctctcttccatccccattttgagagggcactgagagggcactggagatggacttgccatccaggttcttacagttgccagctacatgacttgaaccacttgtgtgtctctccgtggttttaatttctccaaaggaggatagttatatttcacatagttcagatggattaatgcatttgaaaatacctttggacaaccataaaataacacacaggattgctattacaaggtgagaaagaagtgcagccacttccagtatgtgtgcaactcagagaaacaaaattcagagctaaatgaaaagctgtgtgattatctacataggtttccctatctacttctatgtctttctggacatgtgtacttctgaatgtaacaatgtacataccaactgtttatagtactgggctataaatgcttctgtgtgaatatatgtgtatatgtgaataccaatgagtaacctctgtgtatatcgtgtacatatgtgtgtatatatatggggtgtgtgtgtgtaccaatatattgccatcattatgcctttgcttgtatttctctctggatatgtttatatggatgttatgcattatctgtgtatatggaatcagcataggcaagtgtctgcatttcttggacttgtatcatatcccttgtattgcactgagatagtccataaactttgtttcctctagggacatgaaagtaacatttgactacttgtcatttcacatcatttcacagccttacctttcccccctagaaggttgtttggcttgcttagtttttcaagacaggatttctctgtgtagccctagctatcctggaactcactctgtagaccaggctggcctcaaactcagaaacctgcctgcctctgcctcctaggattgatgagattttttaatgaatatttctctctacataatttgcttctcctcacccatggcagaataaaacaagcaaaagaaaccttgtatttttgcaatgactcccaaaagcactatcctgacaaaatcttccctggaggatgaacaatgctccaaatattggtagatccacacaatgctcacacagattcttttcagcagttctaagctactgtgatgctttgctggccagcccatggccccatttggtacaccatactagatcatccattaagttcttccttaacacatttcgtacagaaatgtggttcctgttcatacagatccctttgccatgattcccctgacctgatctgctggatgggtgagtagctaaagttcctacctgtgagcctttgtgaaaaattgaataaatgtgggggaacatatagaagacccctgagctgctaacaccaaggcaaaatggggggggggtggaaaataagatataccatcagttataattggccttccaagccgacagcatcatgacaaaatcccagcattattctgttcctttcaacataacaaccaaacatgagaattggagatcagcttgcaaagagttctggagattaagcaagtgaaaaatctcataccgttggccacctcacatcctgcctaccttctttcttctagcctgagagtgggaacagctctccccactcagagtggaatgaccctctatcttttctcttaccataccgctttgtgaaaatctgcagaactacaaggtcacctgcccggaaaaagaaaaaaagaaaggaggtcagggcataaatacaaaaggagactaagactgagagtcagtaaacagcaaaagggagaattacaagatactagaccattaatctgtagattgttcagccataggtaggacatctgcattgaactcacacacaaaggctcaggggctattttgggagaagggatagaaagattgtgagagccagagatccagggaaactagaatgaaacattgtcttttggacacatggcagcaccatgatactcataatttcaccatgacatgcaaaagatcaagccagataacagtctatcgcggagatgtgaggggctcctaaatccccacatctaagtgaagtactattaacagctggaagcttcaagaactaagaataaattgttcttaagtgcatggcccctggtatgtcaagcagaagccaatgggtagcttgatattcataagtatataaagagcacaaatcacactttgtatatatgtgtccatgagtgtgtgtgtatgtatgtgtgtgtgtgagagagagagagagacagacagacagacagacagacagacagacagagacagagagacagagacagagagacatagacacagagagagaaatggtagcgataagggctagatctgggaagagttagagagataaatgggggttaatgcattcaaaatatatcatatgcatatatagaaatgtcaaagaattaataaaaatataattttaaaaacaagatcattggtctaaggctgtatagaatcaaggtaagggagaaagcaagaagggagaagataagggagagggaagagaggaagggaggcggggaaggaagggaggaaggaagcagtagcccagagacacccagaaaagaggctatatgtgatgcaaatgaagacaaaggaagagttggtgctgcaagaatgccagagaagtacagattcctgggttaaaaaggacagagaatgtcagaaggcaggtcacttacagtgtatgcataggccactagtcactggggaaaaaagaatgttttagatggtaaccctaatacctactagtctctgtgggaagaggggctacagagtttccatatgtgtccatctctctcccctcagtctcacccttcattgaaacgtgtgtcactggtctctccaaaagttattaatgccaccaaacatcatctaagtgtcctgtgggcactgtaacagcacagagaacgatagtcggctactcatgctatggcctttccgaacaatgcactaagacttcctcattggccatggtgccaagaatctgcctctgttgctaggagcaccatcatgcagctgagtggacttcaatattaactctaatggctgattgcttttttgttttaggacagtcaccacctggaaaacctgaaatccacaaatgtcgttcccctgacaaggaaacattcacctgctggtggaatcctgggtcagatggaggactccccaccaattattcattgacatacagcaaagaagggtaaactgtctctttccttaatgtcaaacccaagcagaatgctcatgctctcccagatccaacttatgttggtgctgagatagaaacaccattctttcctggatttgcaccaatagttcatcccgccaggaaaggaatttaatgtctctgcccatcttgttcagtaaagggttttacagaacagccttcaaatgctcattgaccagcagcattataatattaaccaagtttccaattgtctgtcacaagcttagattgcagacaaagtcaccatttcctaagtgttggctgctcatccataaaccacaggccatttgtagcctttttttttctttgttaatacactacttttgtaacataactgaattatataaactgtgttgtggtccttggcagccatggtacattaggttttcaaatgtgctccatggccaagaaaataacctttaaggaaaagacctcgaggattatttttaagcaaattgctagtctataaaatacaatctcagccagtcctgggagcacacatctattatctcagcattctctacgctgagacaggaagatcacaagttcaaagacagcctgaactacatagagaacccctatttcaagcacaacgaaagaataaaattcaagttctctggaaggcatatttaaatgtaacactgccgtgagagcaaaaggagatcgtctcctttttattttgataaaaatcacagtgagcccctcttagaaatcttaagtgagctataaaaatattaatttagcaaaaaatgcacctctgtatcttggacctaaaaatcaaatatgtattactgatagagacaggtatgccactttccaaggtctgcttgtacacaaagctgttcacccatctggcatccaaagatgaatggcgcaaatgcttaaagaatccaggactagaacagcctccaacccctgtgtggtgtggctggagttgagactgttaaaatatgagcatcttaatgagccacatggggctgaactatccccccttcatgcccacctcactctgttgctcacttgacaccatctaagatacattggcatcagtgtatctccccctgaatcctttttgtaaaatgcatctcagcatgtttttgtgaccactactgcattattgatggtcccataatgcgcatattgctaatgaaggtcccaactacccaaggctgcccaacagtgatgcgactggtatgagtgtaccttggccactggtaactcagaaggaaaaataacaaagtgcatagaaacatatgcagaaaaagggttagtgaacatcagagcactggaggggggagagctaaactaatttttccaccccttcttccaacacacttctttccctcacaccccgctgatatgagtagagcacagagccacaggaacccatttttctgctttcatacttattctttgaatgccttatcctcataacccagttatattagtctattaagaacaaaaacgagaccactattttcttattcactcttaatgcattactcgttgcagagagaaaaacacctatgaatgtccagactacaaaaccagtggccccaattcctgtttctttagcaagcagtacacttccatatggaaaatatacatcatcacagtaaatgccacgaacgaaatgggaagcagtacctcggatccactttatgtggatgtgacttacattggtaagggaaggggaagtggatgggtaatttgttactgttatgtacttattaaaagtcaaactctctctgggtcttcctggcttatgggtggattccagaaaagaaaggtgagagaactcacagtatcttctttaagagcattttacaccaacagtgtcgacttttcctagagagatcagttcttgagatcttcgtcttctcatattttccctcactgctaacccttgtattttatatccagtgtgagtgttctgtgtgcctcttttattaatacttccctctgccctctctctgcaactctcttgccctctctagcaaccaactcaagtttcttctcttggttggtgggggtgaaacccagagctgttcataaaggccagctctccagagcactgagctacagcaacagctccaaaggtcttttctttctcctctaagaagaaagggatgctttctggaaagggaggtcttttaaagagatctgattttgtatgcacaagaatcaaccctaatgctttgactgaaattcagctctcaacaatattatatctacttcgttattaatttgagatattattattattattcaaaatcagatgagggtgattggcatatggcttaatgacagggtgctgcctaatatgaattaaaaaaaaaaaccctgggatcaaatgtgcccaaaatataacaacaacaacaaaaacaataatgataataataataaacaattacaataggaagtattaactggctgaaggttaatgtcacttacgtaatgtttggggaaagtattcataaagccaagctgttgatttaagagatgtctgcacaatcagcactatgcatcaggacaattgactacagctgcaatggcttttatggtttagcacagacactaaataaactcctaggaaaatagatgggataaggaaaatgaggtttattatttgccttagataataatttatgaagcaggtaataagatttgaaattagtcaagtcttcctaatttaagtaataacacacaacaggagcaagcaggccgaggccttacaattatacacatctccctcccaattgagggagatttatttttgtttgttcgttttgttttttgtttgtttgtttatgtttaataatacactgtatccaattagtgctactcatatgggggtgtcttccagtgagtcatgggcaccctgcaagtaatcacctcccccaccctcaaagaaaagtgatttttcttctcctccagtctctaccaaccaccagtagctcttcagctggatgtggggcctcaggagccgctctcactccatgttaaaaggtttgactgatttgatcttgtgcagatcctctacagagagcctcagtggctctgaattcatgtatacaataatcatgtcatgtctacaagacagcatttcccagcattcctccccaccctccagctattacattctttctgccccctcttccgtgatgtttcaagagtcttgaggaaaggaagttgatacagagattgcatctaatctgggcgcccacagtcaagaataaataacatgctattgaccaacaggaaagaaaaggtgaggcaagccagcaccctagttatttcaccgttaggacagtagttccatggcccacacttcgagaactctgagactagcggccttgtaaacatgccctgtggttatttcttaattgtaaaagacatataacaaaatcatcattttaaaataatagtaaactgtataattcatgacattagttcattcagaaagttacatacccattagttaattctatctcccttctgaggggaaaaaaactattttaaattgtttccaaataaatctacctcagtgtttcaaataacactcatattgaatatgttcctgaaactggtaattgtcccacttctgcacctggcatatgggttcgtgacatttggggaggggcttaaatgatgatgcattattagaacattattttattttcttaattgaaaatggattcttcttgtacacaatacatctcaaccccactgtcccctgcccccactcctccctgatatgctggtatgcatttgagaaatcttaatgaggtatatgtctataggatgtcgctcaccctcccaaagtcacccctattcctgagaagaggatggccaagtccacaccctgcatccacactagcattgcttctgtgtaactaatgtactgaaaaattttctgccttaatattttttagttctgtttttaatttctgaatattcagccatcgtgatcccctttttagccccccaacttgatgtatgaaggtcttggtctacctgggagtggattgaggggttgaggtgtccagggcttgcctgttcaagtgacttgagaccattttaataaactgcacaccttaaaataataagaaaaaaatgttaaacgtttgctagtggaagttcagtaaaagtttcatgaatgaatgagccaacaagctgttttagtgttaattagggaaacactatcaaaaagttcaagtgctgtatatgtcttaatcatgtactctctggcagagttaatgttgttctccagaaggaataatgcatattttgagtataaaacatagctagttgatgaatgcaaaactctctaaacttgttacctatgaaattatgaatatgaatagatgatgcacaaaatgatgtgcagtttttcttcaaggagatgcttgttcccaactaagggaaataaactattttgaatctctttcccaataatctcatatagcaacttcaacttgaaacttgcatcaaaatacagtcaaaacaaaatctcagttggttattattgttaccattcaaaccctatgttcacatacaaacatgattgattgcatattaagaggaaaaatgtatttatcatgccctctaggagctcattatacagtggagaaattggactgatagaaatacaggttatgttagagaacagaaaagaaggtccaagcagtgaagaaaactaaaaatgtttttgtatctacagttgaaccagagcctcctcggaacctgactttagaagtgaaacaactaaaagacaaaaaaacatatctgtgggtaaaatggttgccacctaccataactgatgtaaaaactggttggtttacaatggaatatgaaattcgattaaagtctgaagaagcagatgagtgggaggtaagtcaaacagaagcctactggaggaatcctgtcctttggcaaggataaacctctcacgacagaatagatcatttctctaattagtttccaccatgttggcatcaccttgtagacatggccctcctgggtatggaaattcctcccccttctaatgagatcaaaagttattcatactcagcactctcagaaagacagctgctcgtactggacaggctcccaacttgccttccaaaggatgtatcagatccagatgccttgaagaacataaactatactgaggctggtggcaagaggatttcagtttaatctgtacatggtcaatatgtttttaaagaaatactttgtaacccttcagtataaaaagatagggtcgcgattacaagcattatgatattctacccttaaccatttcagtatatgtctctgttgaaaggggacatttgcaaatgcagtcaaaattaggatcacacattttttaaaaggtaattaaaatccctacataacatggtaattggtgtatattttaatcttctctgtcttggtttcctcaaaataaaatatctattaactggtttgtccaaaccaaagactactccaggacaattttgatacagtgaggacaggaggtcacatcaggatgtcacacaatctttactttttactagtcctttgtttaatcacttagctgctgtccctgcttcagtgacttttgcaactagacttgagatttaggaactgaattagattcaacttgaataacatatagttcaacatactgtataagtaaaaagtatgaaattcatactacattcatcatcatcatcaagaggcatgcgccatctggtctacctggtaaaaatgatacttaagctaagtcttagattagggcggtataaatctggtatcttcattgctaagtaccactttatttagatacaattacctcaacattcatgaagacttggagttcttcctcttagtagttttagcaccaacaaataattctttgactcaattacttcattggaatttgtaaactaataattttttttctttttttttattaggtattttcctcatttacattttcaatgctatcccaaaggtcccccatacccacccctgcaatcccctacccacccactccccctttttggccctggcgttcccctgtactggggcatataaagtttgcaagtccaatgggcctctctttgcagtgatggccgactaggccatcttttgatacatatgcagctaaagacaagagctcccgggtactggttagttcatattgttgttccacctatagggttgcagttccctatagctccttgggtaatttctctagctcctccattaggggccatgtgacccatccaatagctgactgtgatcatccacttctgtgtttgctaggccccggcatagtctcacaagagagagctataactgggtcctttcagtgaaatcttgctagtgtatgcaatggtgtcagcatttggaagctgattatgggatggatccctgcatatggcagtcactagatggtccatcctttcatcacagctccaaattttgtctctgtaactccttctatgggtgttttgttcccatttctaagaaagggtaaagtgtccacactttggtcttcattcttcttgaatttcatgcgtttggcaagttgtatcttatatcttgggtatcctaagtttctgggctattatccacttatattcagaccaatttcccttatgaatatcgatgcaaaaaccctcaataaagttcttgctaaccgaatccaagaacacatcaaaacaatcatccatcctgaccaagtaggtttcatcccagggatgcagggatggtttaatatacggaaatccatcaatgtaatccagtatataaacaaactcaaagacaaaaaccacatgatcatctcgttagatgctgagaaagcatttgacaaaatccaacacccattcatgataaaagtcttggaaagatcaggaattcaaggcccatacctaaacatgataaaagcaatctacagcaaaccaatagccaacatcaaagtaaatggtgagaagctggaagcaatcccactaaaatcagggactagacaaggctgtcagtcttgccctacctattcaacattgtacttgaagtcctagccagagcaattagacaacaaaaggagatcaaggggatacaaattggaaaggaagaagtcaaaatatcactttttgcagatgatatgatagtatatataagtgaccctaaaaattccaccagagaactcctaagcctgataaacagcttcaatgaagtagctggatataaaagtaaactaataattttattatctctcatatatatgagttaatttgtcaccaagtatcctgttgtggtttgggggaaatattttttttttattttgagacaaggtttttctgtgctgccctggttttactgaaactcactctgtagaccaggctagcctcaagctcacagagatctacctgcctcactttttaaattttttgagagaacttttaaaaggaagacagaaaggatagaatagagtggtgcaaacaaggcactgtctaaatagagctaggcaacctaaatctccaatacttgtgtttttaaaaaggctctttccttgtaacaaaattcagaagtgacttctgttttcctgttcctccttagatccacttcacaggtcatcaaacacaatttaaggtttttgacttatatccaggacaaaagtatcttgtccagactcgctgcaagccagaccatggatactggagtagatggggccaggagaaatctattgaaataccaaatggtgagtgtttgggctatactttttacctgtatttataaacagtataaacaataaaactgcatgccgtcgctattaatacagaaactattttgagcagtatctagaaaaagtagctagaaatgtgattattatttcttaatctaacaaaaagacattcgaaagaattgtattactgcttgagtcacagttggcaaacaccacgttttagaataaagttgcaagtataagcttataatgtcttccaaggactcactggtcattcttatgcctccctgtctgctttatgcctaccaactattgatgattgcttttcaggagatacatgtagaaagaaaaaatcttgtagaaagaaaaaatcttgagtccatgagctttgtgtgttatgttgacttgctgtttggtttttaatgataatttatatgtgatcaaagttctctggctgtttgtcttttagacttcaccttgaaagacacaactgtgtggatcattgtggccgttctctctgctgtcatctgtttgattatggtctgggcagtggctttgaagggttataggtacttcactatctctcagcccttctctcggtcattgttattgggaataatgacaaaaagccctgatacaaagatgatgaaaaccagcaaacagcccaagtacctcatttatccattagtcccagtaatttcgttcatacaaaaatcctttttcagaggttttttaaaagtattaaaatgtacttatttaaatccagtgctctttctatcaaatagggacttagaactgtaaaattgtggaaatctggcaaatgcggccaacactgagaaaaccaaatagaataatccagtagcctaaaatcatcatccaaaattaaccaacatagggtgtagtgtgtgtcttcacaagtacctgtatcatttactattactttcacacagctacagacttcaacctcttatagcccacgcatcagctatttgggaattagaaagaaaatgaaaagctctttcaaatattaacaatgaaaagatgagtcatttatccactctcacaaattattttatagcatgatgacctgcatctttccaccagttccggggccaaaaataaaaggatttgatactcatctgctagaggtaagtgccagaagcagaggatgcagtgtgactcactacgtggtgataattaagttcacacagtccccattgatccagcctggccctcttgatcatccttttccagtggttgctcctcggcagcatatatgttaacagaaggaagcattcgagatgaatgcgttaatcttcctattctaaatgtcatggagaaaggagagaaacccaggaaacacccaaattcatggtgtggcatgctatcctgcccagggctgctactgaagacagagaggactgttttgttcaaatagtgaatcttgaaagatatcttaaataacttgataccactatctcctttacacatgagtcaaagcttccacttgaatggtctttacataaaccattgtgacagaattccccccatccccatgccccatatgagcagtcagtagaccagtactctatgggctggtgttttcctaagtgtattagactgatctgagacaaacctaaagcatttgtctctaggtagaaatgtacagtttcaattttaccttaacagtgatgtgtagagaagccttcacctatatgtaaaggtaaatgccagctgatgctattatcatgaatttaacttgtcttccaaaacactttgattgcaactattatagcaaggactagagctaaggaatttaccaccatttttcagtctagtatcaacctttataaaaccaacaggaatatctcacctaagcaagttaccaactgtctaccttacaacataacctgctagccacagagacttaatgataaatatctatttagggttaagctttgatactctttcttccattatctctaatgctcaaaagaacccttgcagaaaactactgctactctcatcataaaattggagaagttgtggtccagcaaggaaaataacctacctgaagtcatagctacatgataatggataaaagccaaggcttaggcacatgacctatgttagaggactgagaaggggggggttattggaagagaaaagaattgaggtaagagggagagaagcaggagtaggggagacaatgtggaataggaggatgaaagagcaggaggaaagagatgaaaaaagtagagaagaaactaaaaatgataggatcagaagagaaaggaaaggagagatgggaactagggaaaagagtttgagaaggaagaggagtggcagaagccagagacaaggaccactgtcaccacactccaaaaagtggtagaggagcagatgaggccagccaccatatctcagaattactcagccaaggagaaccagtgtcacatgacatgcaaacactatggcatcaaatgtttcacaagacattttcattttgtagttatatgtttatgatacattgagtgttataagcccattaagttcatgaccactattagaaccacagggaaaaattaggaaagacatacagagaagtttggcaggtagtactcaaaagatgcctctaggtggcctgacacacacatgtctgcagtctggtgagggagggattctgagagactgcccacaggggccttctcctgagcagaagcaggtggaaagcttccattccaagactaagcaagatacagcctggctgctgccccaggagcaaagcccctttactctgctcagataccactcagctctgatgccaagggtggcgtgtgatgaagctaacagccatctctccttgtatctgtgtttcaatagaagggcaagtctgaagaactgctgagtgccttggggtgccaagactttccccccacttctgactgtgaggacttgctggtggagttcttggaagtggatgacaatgaggacgagcggctaatgccatcccattccaaagagtatccgggtcaaggtgttaaacccacacacctagatcctgacagtgactctggtcatggaagctatgacagccattctcttttgtctgaaaagtgtgaggagccccaggcctacccccctgccttccacatccctgagatcactgagaagccagagaatcctgaggcaaatattcctcccaccccaaatccccaaaataacacccccaattgtcatacagatacatccaaatctacaacatggcctttaccacctggccaacacacgcgcagatctccttaccacagcattgccgatgtgtgcaagctagctggaagtcctggagatacactggactctttcttggacaaagcagaggaaaatgttctaaagttgtctgaagatgctggagaggaagaagtggctgtgcaagaaggggccaaaagcttcccttctgacaaacaaaacacatcttggccaccactccaggagaaaggccccattgtctatgctaaacccccagattacgtggagattcacaaagtcaacaaagacggagtgctatcattactccccaagcagagagaaaaccaccagacagaaaaccctggggttcctgaaaccagtaaggagtatgccaaggtatctggggtcacggataacaacatcctggtgttagtgccagactcacgagcccagaacacagctttgcttgaggaatcagccaagaaggttccaccatcgcttgaacagaaccaatctgagaaagatctggccagctttactgcaacctcaagcaactgcagactccaactgggcaggctggattacctggatcctacgtgcttcatgcactcctttcactgagagctagacttatggacagattgactaaaatgtgatttctcttcaggttaacactacagagtcatgaagtaatgtggtctgctaacagatgttacaggatgtgggtataaaaaaaaaaaacaaaaagaaaaaaaaaacaaaaagaaaaacactacttcactcctccacacgcttgtgttcagcatttgcctctttccaacagctgatttccagaacaaatcaacttgtttcctgtgatttgtacatttgctctttgctaccatatatatgtgtgtgcatatatatgcatatatacatgcgcatatatatatattcaatgaaataaaagcacatcgcttactattcttgagggatggtgccaacaggtacagcctctgcaatagatttgtcatcagacagaaggcatgaaatagtcaaaatggcctagcacaagaagatgacggacaggctggaaatgccatgaaaatggctcttaagaactgatggctaagcctttacactcctctttcattttcatgatgatggtcccaatattgcacattttggaaagaatacattccaggacaccagccaaattgtttacatccgtccctgtaccttaatgacccattgcctgtatgcaaatggtatcatgcccccagtgttttcttaaggtgatttgaatatgttaagcctgggttattctgctgaaactttattttattctaaggcttcttaagtgtgtagtttgaggaagtaaaattttcatacaaaataaggccaatgaattccacgcagtgaaccttttcaaacgtgttccttgcttcatttgagcaagagatggtttgttataaaccctagtgttttcttagtagaaaaaagcgattcccccaagactaacgatctaaaaggtaatcattgcaggatgctaatagaagtgttgccttactgtacatacgattctactttaatacaaacccgtaagtttagcaatgtatttttgaagactatttttctatcgcttaagtaaagactattttctaacttcccagtactgctgtttacgtagtcaagtgagtagagtgatttctgctgcaacgttacagtgagtattcaaagtttatcagtatatgcagtccctgttagactgaagtgccaggcaacccattgcccactgaggaatgcaaagtagatgaaaacctcaattgagtacaatagagtaaggtttatctgattatttttatccctaggatacgttaaacagcaaccatcactgactttgggttttagggctttctatagacccataacacatttctcccatgagtttagggcatctgcccacctatggaagagtctcccaaaccaccatgaacaagggcagtgatttctatggagggtttccaagacagagatctgactttgttttgtttccttttatctgagcaatcctgaacacaaaaggattttaagtataacgaacgtcagcatctccttggaattcatgcatttgcaagatcttggcacaggctgtgctcacgtcacagatgtccagataaaagttttaggaaagcaagcatctgcccagtgataacagttttaaaggtcaggggatggtagaatctgcaagccaactccaagggcaggcttcctgggaaagttcaaagcaaagccttgggtctccattggaccatagcatctatgactcactctccctctgctttgcaaatcagttctctctttcaccaactggatatagagactctgaaatcacctcttgtgagttcagcattccacccaacatgcacatgccctcagagattctccgacgaaggaaaagaaacaaaggaaacgcttccagaactacaaatgcaagcagccaaagcttatattcctaatatataagacatcttgtgaacaacagaagtatttgggaaagttgtccaagctcatgcaataccctgaatcctccatacagaatgtctgagaaacaactgcatcttcaaagacacagagaattggagtctgaatcgtactgcattcactaagctcccaggcatgcgcaagctgaagaagaagcagttttctctatgaccattttcataaaaagttatttttctctccctctcttggaaagtatggagaaaagtttattatcttgaaatgagcaacaatgtatgtaaatagaaaacaagatcaaaactcttagtgatttaaagttcacgtagcaatgttgcttatataaagtcacacaagaccatgacatgcaaaatacacacaacctccaagagggtcagtgaatctaattcacctggaaagctaccaacaaaaaaataaataaataaacaccaaagccaatgcaagctaaaccttctttgccaagacattctatccttctccaggagacaaataaatgcatttatttacaaatcaccactataaaattgatgctgcatatatggctcatagtatgaaatttctaaaaattggctttagatatgtaattttgaaaatgtggaaaatatggctatctaaagtcaagttacattccacaaaaataagttagcattcatgagataaaaacaaatctatacagttctatacatttattaaattcttgtggtaaaatattttctattgaaagacagctgcttgaataaaagaaggcacactaggagttgagacacctgggttctagttctgttttgccttggaaagaagaattacctattctagttttctttgtattggacccaataatctctacagccttttggaattcagtcttcttgattctgtggcttgatgaataatcaaaaccaatcccttgcatctcagtgaggttttcaggcaattataaaaatgcagagccacccacattcctgtgctcatcctgtttcactctttaaagtctcagcacccatttgtctccacatactgaacatgtatttcatattatatggacaccatgtaagtcagactctaggatcatatggtgatatgggtgctgaggtaagatatagcgctaagaaagacacaggagatgagacacaagtctttagccatgctcattcctacatggagccaacagcctcaaacttctgttcttgtatttggttgttgcctgttttctcatcatcctgtttaatgaataaccattgcccatatagattaaagaatcttttgcgctgaatcatttcaaaatgtatagttttctaagcaactctctgaaaaatttcaagttatgaagtacatggaaactaaatatattcatttggatggctgatggaactttaggacacaaatggcagaatgttctctgataagttttaacaagtacatagaaggaacttcatatgagcacaacttaccatcagcaatgccactgacttttaatagatgatacattctcctaagtgcctgagactaatcatggtggtcagttataggtcaatgattcactgtaaaccagtttggtggaaaacagtcaagcccatgttgcatgtgtaaaattaaagccgggggactctttacttgatccaaggtgaatcctcagtcaatgaacaaccaaaggacctgaactccaggttaaagtttgtcctgatggaaaactagctcctccattttcattctgctttagctgctcatcatttgtaaaatgacccagcctgcccttagcaacttcaatttagcatagacaagggagaaagagatctgtatatgttttacaaagtgcctttctttgcttctaaaaggtttcattttggaagaaaagtgcattaattggaaagcaaattttatcttaaatggatttcttttaaataaatggagagatgaccaaaaaaaggaggggagatgacaaaatgttctaaagactaacgaacaaaatgtgcagggatttttgtgtatagtttaactgaatcatcagagaactgaagtgaatagtatcaatcattttgcctgagtctgggcgtgattggagatgaacccaggagcctgtaattcaagactttccattctgaaaacaatgttgattcattcttgaatgacactgaattgtatgcctggccccgaagaggccaatgtgtgcactttgaagctcttcacccagatggaaaagtagtaatgaccttgaatatctatcctgtgacttgttatggatgaaagctttatatatacatcatcaaacaaggtttcttttgtgactttttttggctcaagcacaatactgattctggtaggagagtctctgagccctcagtgtccagctctgggcatgttactgctactaaataggctgcaagaccttgatttttttttttaattctgaccacttgtttcccctcttgtaggttaaccctccaaaaaaaaaaaaaaaaaaaaagcttctacaatttcttctaggtctgtctttaatcctcatgagttaagtaaaatctaagattgtagttgaaaggcccaggggccatggccaacacgcccctaacttagacagtaaatgcctgaaactgtgtaaagacatgcttaacagaaacctgagatccagatctccaaatcagttagaccagaactcttgtattctgcctccttaccatttctacattcttagagccttttcagcccctctttccagggcctgctattctccctaaagattaattatgcagaatagtaaagttggggtctgcgggaaagaaattacctacaaacaatgatttgactctgcataagatgaaccaattgttaactctccacacagacacaaacctaaattatggtcataaataatgcttcgttttgatatgtatgtgtttaaagattcaagccagcaacttattttctaataagtctgggatgtcttgatgagtagatgttgactgccttaaaaagaaactttaaaaaagtatactgttttcttcagagtttatgattcaacaaaagaatctacttataattacagtcctttcctatgagtattaggtgttatctgtgaatcacatgcagattttcctcttggagttttttttcccaaaaagataactttaggtttgagctctgccggtatcaatttccagtggaggggaaaggtaaaaaacagaatgttccaaaatgtagggcatatcagaactccaccaaatggggtattcattcactcaaatcttaccagaaatggtaaatctacatgtaattgtgagtgaattgcagagaggtaaacataacttctaagaccataggctaacagcagttctgttcacgccaattccttctatctcgagttataaagcattgagacacatagagtagaaaggcaaccatctatacagtctggtcaatgagtaaagggactcacagataatcttagcatgttgattagtatttacctactgttgtttaaaaagagaagaagaaattctaaaaaaaaaaatttgtaacagaaacaggactatcaaacataaaccttatcagttatggtcaaattatgcccccctggatacacttcaaaatacaggcttggtttttctgtgcacattttgcaaatggggggttgtcttttatcacatcctctaaaatacaaacaataaaaaagaaattttaagagaaaaacacctctgaaaatcatttgttttactaaattctgagaaacagattttgaatttttaaaactacctcccttccacatcctaatggccttccttcaaagctgcttatagttagaaatgaaagataccacatttttatgtttggactggtgttgatggaatatttgatatacttttcatgtgacactcctaactctaaagtatgttattttactgtaaagaatgttattttacactattttgcttttttgtgattcaaaacccttatatgccatattgaagtatataatcctcttattgtaaaatttatcatgtaatacaagtgataatcattatttaatgacttatgatctaatcatatctaatttcaatataattatgtcaatgtctgtaaagcaaagctaaatctatataatcatgtatgtaatcatatttctgttgaaactgtgaatgttgtgactttccctttaatctttgtctacaagtgatagtgtatgtcattgtataactgacttgggatgctagtgtgtttacagtacaattcaccagtggttgaaatgtcaaccctttggcttggcttcttgtgatccccgagtgttctctgcaccttgagacttgcttttgtgctttgtgctctgtcattaattttaaacaatgtaagagtctcttgtataaaccaaagtaatcagcccactgagtgatcatgccttctgtaaagccatattgaagtaaagactccgctgtagcataaggtcccctgtctccagagctgccactacctcgctcctgctctttccctacaaaatgccaaacaaagtttaacccttaagtggaatattagatgtgcttgctattattgtcatttttaacctgataataaaccttctaattcattactttgcagatgtatgctaggttttatgaataaccattttcacattttgatattttgtagacattgcctgatgagcaaagttcaaaaagagtacacactcagtcatcagatttaaaaaaataatcacagagtgcaggtgtttttcctgtcagtgagtcacctcaagttgggtggccaaagcaactataaccttggtcactatagctgaaatacccaactcagtgcctggctcaaagatgtttatccccttggtctcccttggttctcatttttttttaattaggtatttatttcatttacatttccaatgctatcccaaagtcccacacatggtcctccacctactccctcaaccacccactctcacttcttggccctggagttcccctgtactgaggcatataaagtttgcacaatcaatgggcctctctttccactgatggcagactaggccatcttctgatacatatgcagctagagacaaaagctccgggggtatttagttcatattgttgttccacctatagggttgcagatctccccagctccttgggtattttctctagctcctccattgggggccctgtgatccgtccaatagttgacttctgtgtttgctaggccccagcatagtctcacaagagacagctatatcttggtccttttttgttgctgttgtttgaaatgcaaatgaacagaatcacttggatgtggatgaagtgagttttctaatttttggctgtcagatctgtaatcataaatttgcaatttcatttccccaaactcccaaaaaataaatatcctctttacttgattttaatcatcaaatatctagtggtattgaaagagtcagccatttatcagaaacaatcttgttttgaacttaaagactcatttctatgtctcactactgtgatatcgactttttctttagtattaaagggtgatatgatgctaaactcttatgatttatcctcctacattttttactctgcaaatcttgggttattgcacattgtacttcctagtttttatgaatttattcacttgtctccatccactttgtagggacaacatggacagttaaatctttgtcagttatatgaacataatgctaatttctctcatatttttattgcatgctaaaaataatgcttgccaaatggaatcttagacatcccagaataatatggtcactatatttctatttctgtcattattgaaaatacccagctcagtgcctggctcaataaatgtttgttttcctggcttgtccttctaaatttttttgaaattgagatgagcaaaatatacatatggctaaagcaattttattggagatattttaaccactgaatgacctgtagtcaagaaattgttcatataagttgaaccaaacagattttccaatctgtgtacacccatctcaatgacaaggcaaaatccccctcatttatctcatttgtgtcatatgagaagttgatagaaacaaggtaagatgaaattgggcttatggagaacgagtacaagaagtgcatttaaatgctataaaggaagggccatcccatcaaaaggtgaatggaatccctttgaacagtatgattcatcactattattaacaatcagacctttttagtaattgtgatctggactcatccaatgctcaggttgtgttacagaactgtgcaaggtgtgtttggattacttgaagacctctttctgctcccattaattctctagtgctgagtcttattggagaattaacatattctttctcacagtgattatcagtttatacagcttggctttgggcaaaggagcactgactttgctgtacttctattagagccatctgcttttaattctagggctcatgtgtatagtctccctccactatagagtctacacactcatcccactattttgaagctgggagatgcaacttccatcttggtgtgtagaattaagaaataaggtcataaggctgttaacatgcccaccctctcctcttctccagggaccttacagagtatggaaagaaaatctccatctagatttgatagtccccctaaagtgttcagggaaaatccaacaaattcctgatgctgtgtaattcagaattcttaacaactaaaattatgactcttatggtaagcacctcccaaaccatactgcacaacagcagccaaccctgggagcattaaacattctcttttaatgaccaggttcatattaaaatgtgttctttacaaactgacttaaggtttatattgttttatgagttttataaaatacttttaagtctagaacatagccaaaataccagtgggaggttggctattgaataggagtggaagaaaaaacaggaatttcataagtatgtttagaaaaaagttgtaaatgccatagtacatgtttggagtggtgtttacttcttatgaaacttagaaggtaaccttaaatgacattgctggtagtttcattttacgtgatactgcactgttgctgaactggtattcatgggatcccaatactttctcagaggcagcatttttaaaatggtagcagtgtttaatttaaatttattttaataagctgtttcctagtgcatacttacaccacttattatatgaaaaactagaagcaagctctttctttaacaaactttattaaaacctgttgatttggtttggtttggtttggtttggtttggtttggtttggtttggtttggtttggtttggtttggttggtttggtttggtttggtttgatttggtttgatttggtttggtttggtttggtggaagggaaaaatgacattccaaagctttctggaactaagatactgaggcacatgctaaaacattttatctttggccattcatccatggcatgtttttctaaagacaaaaattgcactcagctttcaacaccttctattttccttctaattctaaatcaaatctgactcatgcttccacacaggctgagctctgcctctccgtccacggcccttgtgttccttgtctttcttcatttgccaaattcaagtcttgaaaatgcaaacatgactgaaagcgcccaaaagtttcttggagcttctcctgggaacaaccaagaacaatcaacagaagaaattccaaatccaagttgcagtcagattgtgaaaccatgaaacctaagtggcagggctgatcttttctgtgccaacttcctccaaactagaatcaccctccatctccacttaaaattttacttatagtttgaccatgtttttattgaataaagagtttcacaaagtaccgggaaattgcatagaaaatgtagcaaatgcctatttacaaacatcaaatgttctcagtatcagtattttcccttacttgtttcataaccaatgaacatcacagaagctagcatgcatattcttcaaaactaaattctttacttcttcatttaatatcaccctcaatattgaagctgttgtatatgcttcctgtcttaaaaaaatacatttacttcatatccatgtttcagtaactgatatgtttcatcattcaaatttatggatttttatatttataaggctcaacttcttgctacttgaggtggctatagacatatatcactctactttgattttggtttgtttctcatttggtattttgaggtatcagtagcttccatttattggttctatttgctggatgcaactttagagtttggagagtttctccataatataaatgtatagggtgatataaaaagcatatttttataatccctagatactgacaaattgttgtctccagggtatttgcaccaatacacctgccccatccatgtagaagcctccattcctcaccacatatagccatctagtattggcagatgttctcttttttgataatttgatgaatataaaatgaattattattattattactttaatatccctttcactgataaatccatgtcatatctgaacaattcattgatttctgcttgtattatatgtttcttttactgtatcctgaattttgacagatcataatttgtgcttctctcaattcctgccctggctctctgatgttattcctatttctcatacaaaatctgaatatccaacaaacaattctcacatcactgtaccccttccacacaatattccattcattcagttcttcatcatgtaaacttgagatgatcctacacatctcctattgtgctagaaacaaaactgtcttgtgttaaggttgtacattagttccaagagaagctgcaagtttggaacagtgttccttgctgtgagcatggcccgttgcttagtttgcactgccctttgtttgcatacctttgtttattacccttcaggaaagttttacaccattcctcatgagcatttgtgcttcttgttgtatgaaactcgtttctaggtacctggcaagttttgttgctattggcattggcaccttttgagggaaaacgtcctattctaaacagttactgctagctaaaaacattcatttaaaaaaaattttatttatatgttgcattgcaacttaactgaactccattagttcttatttgtaggttttcttaaattttctattttttccaattatatccctagaaaacaactttacttttgctctccagtccttcacacttcttaattctcttcacgatctgttctttggaataaggtttccaatattactatatttgtgaaagtaagcatatgtgaaaggcctttttcctagctccctactttcaaaaagaatgtggctaaaagtttgctgttaagtggtattctatagggtagcatttatacatacccttggttacattaatgaaatctctttgataatttatatgaacaggtgagtttttctccattaattaaggagtagattattatagtaaaactgttccgaaaatatgttagggctaatttacaattgtattcttgagaaaacatcacttgttcatcgtgtactttggcagttttattagatataattttcttttaaaaattaaagtttttgtacttgtgagattgatcattttgctccttaagatatacaatgttttgaggtgatcacagataaattaatattgtggtttaaagaatccttcttcctgaggttctatcattttttgctttactatctgtaagttaagtgcatattggcttaaattttcagccctttgagtatagtagtttccacatgcctaatgctgtggccttttaataaagttcctcatgctgtggtgacccctcacaacaaaattatttcattgatacttcagtagtgatgttgttatggttatgaatcataacataaatatctgatacataggatgtctgaagtgcaacagctttggggggtcataacccacaggttgaaaaccactgcattgttaattttgatcccttcaatctccaatgtttccctttaccataacatctactttttatgatactaacattgttactttctcttggatagtgaatttaatctcctctttttgttgctccatcttatgaatgcatagctagggttctgtttaccacttccaattgaggttggttggtgtttggctggttggttggttggttggttggttagttagttttttgttttgagttttgtttttattcaggggcttggtttgttgttgctgttgttgttgttgttgttgttgttgttgttgttgttgttgttgttttgtgccctgttctttaggagatcagttttcttttctcatttaatgtatttttcctttattttatcttttgaattctgaattatatggatgagaccaattctgtaataatcattataggaacagatattaagtaaagatccttgtgagacaattcactatatgtgcgggctccaagtttagggacagccccaccaccaccaccaccaccaccaccccttgccacgcagaaacagaagagtgagtgatcaagttcttagaaattttgaatgattggaggaaatcattgtgctttgattggcaggttcacaacaaagagcaacttgaaaattatgtctactaagagagggaccagtcctcagaaaggtttctgccatgtctttttccaaaggagaaattgtaagatgtccttgtgagtccaaaccttcttcactgaaattacccactcgaccacagccacctctgaattacactttaacaagcagtttatagcttctcatgcagggatgtccatgggaaagcagaagccagaaccaacagaagcgggaaggaagagtgagtatggatggccaaatattcacaaaacacagtgatacatatgtcagaacaaagcacatttttttaataccaagtagaactaataataataaaaaggaaggttttgtgtttttttattatttttttattaggtattttcttcatttacatttccaatgctatcccaaaagtcccccatacccttcccccttgttttttttttttttgtttttgtttttgattttgtttttgaatgagcattgtgtatcagacactgtgctaggcagagtttactctgtgtgctcttgggtactggagttcaataggaaaaccaagtcacctctctgtcccaggtctctgcagtgtggcttttttagaaacagcaagttgaatcgttctgataggagttatccaaatgtctttgcactttgtgctacttttcaagaaatcagtattgcatggaactagtagttactgctaccaagccacacctccacttagggactcctcctcacaagttttaatcagtctcgccatcctgtacaaaccattcttcatagccattagtaaagaaacggaatgcatataaggttctatgtgacttttactttaccaaaactttccccaaatagcattctcctcccattccccttccacaggccctgagacctggagatgtaaaggatatctagggaatgctaacatttaccctgagtaactcttacagaccttgctctgatattggcaaaattaatttgcactcagaacttaaccaattgacaagtggtaggcctgtgtgccaatcttcctttacacgcagtgatgatggttgtccagcttttgttttcaagaagaaattctcaaacttcccaacctgataaaactcactctgcagcttgggaattccctattttggaaatagcttcagatggaaggagaacacagattggcacccccacccccatttactagttgtcttgctagagaagttcttctctgatcttggtgtgtagttgtggaaagtctgccttatctacctccagtgaaggggaagagagtgattcaaagcagttgtttcctatacttctcattactcagaggcagctctatttagctgatgttctagaatgaaccttgggcaaggtttggacttgataccccaggtaactgttagggtgaaggagaagtttttctagatggattctctctcctcatcttcccatttttcagattcaatagatattccttcatcctaaagaagtcaagtgagaaacatcttgaaaaatagttttataaaatatcagttagaccataaattggttgtatcttgttggcatgcatttaaaatgaacatattcatggacctaggaacctttcttcaaagatttgttcaaagggagaaaaaaattaagcacacacaattctgtgtccacaagcggtagagaaggacatattaaataaggcatgtctccagcatagaaattgtcacgcttatccctgaagtaacaagccgggcaaactggaactgattgcttcccttgaatccagcagagaagtaaagttgcaaagtgaattgtcatcctggaacttagagagacagttgaatcctaacagtacaaccaagacctctcctggagcagaagtcactgggaccatgactagcaggaacattgagatagtgttggcagactactggaggctgggtatggactaacatgtaaggagaaatctctgccatccaccattagggtgattcctaaactttcatttgtcttatctataagaacatccctggatcaccagggttaatatcaccatgttgctgtgacttcaaaaacaaatgcagaaatatacttaaaagtcttcactttagcagggatccattctccagggagactggctttgccaaagccttataatttgtgtgtgtgtgtgtgtgtgtgtgtgtgtgtgtgtgtgtgtgtgtgtgtgttttataattataaataaatgctgggcattcttagtattctctcgtcttctgaagcagttaaggtagaaaacaacaaaaaagagcaagtaacaagaacaaaaaaagagcttcaaatactagactgaaggtggaaaagggaacaggcaggagttctttattgtttgtgctgttattgttattgttgttgctgttgttgtttcttacgtaattctatcagaagagtaactgtgaagacacagtccagagataagcagctactgaaagattgaagtagaatcatcagagtctaggactactgtgctcacctacacctctatagttaaaagagatgccaggctgtagagttagctcaataggtagcaattgctggatgacctgaatttgatgccctgaagggaagagcactgactcctgaaagttgtcctttgacctcctcatgagtgacatacatgtgcccacccagccacccacactcacactaactaagatagtaaatgatttttctaaaattctgagggaaagccaatggcagcaggggcccaaaggcaaaggtagtatgtagcactgggaggctgaggcaaagggatcatgaattaaaggccagagtacatagtggtaacactatcaaaatcaattcaaataccaaacacactcaagaaaatttaatactctaattcctgaactatggaaaacattccatagagccccatttctaactaggctaacagaaaatctcacatcctgcacagctttcatcagaaagaatcacaaaggatgctaaagtgctgagataaaaactaatatccgaggagacaaaacaaacataagtaccagacttggaaattatatagccatcatcatatatgtgtgtgtgtgtgtgtgtgtgtgtatgtttacatatatatgtgtgtgtgttaaaggttttgttagaaatgagtgggtgcagatactccttcaatgtttttgcagtttctattgactagagacatcttttctatacttttacttttaagctgtgtttttccttgcaaattaagtagacatctagcaagtagcagacaatctaataatttttctctactgtttggagagggattgtttgggttttttttttttaatcaaatacactagtctggatcttttaattagaaacaagacaccattaacatccgagttatcactggaggatacatactaattcctgccatttgttgattatttcgtgatatttgacccctttctctcttcattatctactcttctaatgagattccgtctttcctatattctcatggttgtgaaagaaccagaaataaagatgagcagaagaaccgtgttgaattatggtcaaatcactaaagacagagactgagaaaagactatggaaggcttcaggagagagcagttttacatataaatccacgtgtcccggattctcatagcctctcctacctagatgcccatgtcctatccaagatttgaggaactctcttctgtcattttctttaaaatgtttcctgcttctttagtttgcacctgctcccctcgtctccttcttctctctctatgacccacacattcagactttgaatggtggctgggaactcgtgcagtctctatttttacttccttcattttccttattatcatctgaacatttatatctttctgtctttcagctctggtgttctattctccagttgacttccctggtgaagattccaacaactgagtttttatgtgatttatgaatattttcactgctgaaatttcaatttgtctttctattttcaagctccttgttgaattctttcacgtgtatggtcaccctcctcattttgcttggcagtttattcctatcttgctagttcatctgggtgtggatttatgtcttctttagatttgttgatgattcttatcattcttttccatgtggggctataaaaaatacccttaaaatcagttactgtggaatttttccctctttcaaggagccctgctgacttatttttgatatcacttgttatttttgcattgtaatttctatgtctgggtgtggcttatgggcggagccagctgcagttactctcatatatccagtttcccagacacaagactgaggtgaaccacaagccattggccagttattcctagtttctaccacttaattgtctgcctttgaggagagtaagccccacgggtgagaaaaccagcaccgacagagcactaccgtatcctgtccttaggtctctgacttccagctaactacattcccatagacaatcacttatccccctttgtggagccctggtagttagcatcattgattggtggacctcaatgagaaacagtgaccctgtgactcctactgacttcccactgaaaggagctcccccgcatggttctgactcggtctctctcctataattagactggctctccaagcaaatacaaggtggatccacgcctggcccttcctggacgattccaaaaactggacaatgaaggggaacttgactactgaagcagcagactcaaatatgagcctctcaaaatgggttccaccaccatcgtggccaaatgctgagaacaagacagaattttcccagtgccaataatctagtctcaaggatgcctgcctggttagactttaaattttgctcagtgacaaatgagatcagtgttaattgtggttttggagcagctcatgtttgctttcttttagctcagcctcagccttctgccaccttgttcccccaatttcacatggtgatagctctgtctccatgtgtctctctctgtctctgtgtgtctctctgtctctgtgtgtcactctctgttcctctgcatgcttctgttcctctgtgtctttatgtcctctctctctctctctctctctctctctctacctgtctctctctctttctctctctctcatacatacatacacacacacacacacacaaacacacaaagaggagtttatttttcagtttacaaggctctgtctgttcacaactgtaactgcagtgtgggttttctgaagctttagctttccctattcttagccagaccctgctctccagagggtctcagaagccactgaagtgtttcacccatggaagcactctttctctctatttgttctgctctagaaattttctgtaaacattctctctggtggctgctgagacatcagttccttcctgatagcagccatctcaataagtaactgactggtaacttctcttctgccaccccgctctgtgtaccaaagccacaagtgatcgctggcagttactagcggaagattgtctccctcccactcgcttcacgcttctctgggcttgagtgtgccttcactcatctctctacttaagaaaccacattttataatcatcagaataacaccccaccctgtccctttaaataaaaagaagtcacaatcactcacttccgcacaaattattcaaaatgtactatttagcttcccactctggaaaactcctcatacccagtgcttcacaaaagctcaaatcttaacaactgcccaaaaaatcccagtcatgatgattgtagcttctagtgtctcaaaggtaaaaccagtggtgcggatgagctgaagagcataagccagactttgtgggagtcaaaacctaatgcttccacaatccaataacaacattgccaacgctgtgctgagaaaggctttgtgtccactgccctcgttgatgtatcatcctgaagcacttggtcaaccacatcacatagatgctccctacagccctggaaacacaatgggcctgggatcccagcaagagatcacaatttatattgaatttatagcaattcgtctttaccttgtaccattgcttcctggaggcattctcgggtaaaaagtcatttcttgggtattattgaaagatcagtcagagacaattgcgtttttttgttaggagcaagttggacataagaaatgaagcccaagggaaagtgtggaggctgagctgagaagctagggaaagatagacaagacagctctcacagatggtagcctgcctcttcagcttggtaagtgactctgacacagtctctcatgataaaatacccttcaaggctggaaagatttcatggattaagaatgtttgctattcttccagaggaccagagttcagttcccagcacccatgtagggcaatttacaattgcctataattccagcttcaaggaatccaacaccctcttctgacctccatgggcatctgcacacattacacacatacacataaataaaaatgtcaacattttaacaagaaaactgaagataccctccaaaacagtaagatgtctttactgtgaggctgtaggatgatataactaacaaacaagaacttgaagaaggctcaggaagggatcaataatgtcttgttcaaaccaatgctgagaaaacatttggagaagagagagcattctaagcctgcaaattataggtgagatgacataaaatagaaaggacacaagaagcctctgtcttccatattgatcctcttagacctctttaaataaagattttcttactgaccacagtgtcattccctgtgtacatattcctcactgaatactcaacaagagcacaagaacaggggaaacttaccacagcacttcctgcaagactgtggattgtgaaaccatccaccccaccttttcatcctctctaattttcattgtgtttgtcagtgtatctcctattggtactgctataaaacacacacacacacacacacacacacacacacacattgaaatctgtttttgaatggcagaaacctggaaggcatggtctcttaggcagctggtttaatcattatatgatggttctggattggaataaaataaagacaaatatttcacatctcatacatgtacataaatcaaaaatgctcctgagctgaaagtgtaggtaagtcatatatcttttgtctagtctgctccaatgccctggaattgactctgagcacaacaaataacaacaaaaatgttgttgctattatgtgaaaatacactcattccaaacattatacatgcccacaaaaagatctataaatatattgatcattgtctgtagagcttagagttagatggcaatgggactgatgaataaaaatgtatgaaattaaggatattaaaaaaataaatcacaccaactccataactgtcaactccttgatccattcgagcaactgaaaggatctaagcatatccagggctttctgcagcttttcagcaccctcctcttctcaatgaatgtctcttaccctgttgttcatgtattttctctaccactccattttttcatttgttgtaattctgggattgaactcaggtccacaaatatgctagacaagcactctaccacctagctacacccccaaccccttttatttttattaagaaacaaggcctcgtgaagttacataatctagccttaattcactgtacatcctagagtggccttaaatgtgtgctcttccaaacttagcttcccaggttgtaggattacaggtacgaacattacttccagctaaattaatttcaccattttttatgctgattgtcctcctatctttcttattagcatccttaatttctcagtccttgaccccttcaactacatcctcgtcctccttccataatttattacttttctcagtattgtgacagaaagaataactgacatggcggaagggtttgttttgatgtatggtttatgggagcacagttcttcatggtggggaaggcatgcatagaagatgggctagcttggcctgtagcagtaaaagtaggaaacaattggtaattcggtgctacaaaccaggaaataaaagagcttggatgagaaggagaatcactcttggtcataagtcaacaagataggcaccgtggatgaagattccataatctcccaaaacagtgtcgtctactagggaccaagcattcaaatacatgagtctgttagagatgtgcttcatattgaaatcatagcatcttcggctcctagctgtttcacagagcaaaaatcagtcaggtcaaattcagaactccccagttattgcaccatttaaaagctagcaatctcttccgtgattcagacaatctcttcaccacatgccctgttgattaaaaaaaaaaaaaaaggttagacttttaatatgcagtggtatatattaagcatttctgttccaaaagggaagggtggagacggcagaaacccagcaagaaagctctaggtgtagcatctgaattacaactgacttggctagacccagcttcactcgtgtgcctgcagatttcaagtgtttctgaatatcctggggtctctatcgtaaccaatgcttcaccttcacagcttcatacaatggcctaacgtggccttgtggcagggaatatggcaggcagcacatctccacactgtgataccttttcccctggaactatctcacagcttccatgatcccatcactcgttttgcatgcctgcacaacagaaccacataaatggttgcaaattctgctgccagttataggtgcaacctattcccccttcaagcttgactgcagacatctcagggtgctcgcaccccagtgtcaggaagaacctagcctgccatgctgaagcaggaaaacccaagagtagtagttctcaaccagtggctcacaacccccacaggggttgcacgcatagcaagatatcctgcatatcggatatttacattacaatttatagcagtagcaaaatcacagttatgaagtagcaatgaaataattttataattgggggtcaccacaacatgaggaacagcatcaaagggttgcagcattaagaagcttacgaatcactgccctaaagagaagtcttgagacatccggccaccttccctgacagaggactggggtccgcggggcctgggaggctaggattttgactcaggatcggcgggagccaccttggttcccggacttggcagaaagcagcctgcacaggtgagagtgtgaactacagaagctaacagcttctgggacaggcaagagccacagagcttctgaggcagcgccatttttgggttccagacatccagccacctaccaggccagaggtcaggtgtccgcccagctcaggaggccctagcctcaggatccacaggagccattttggttccgggactccgcagaaagtagtctgcacaggtgagagtgtggactactgaacttaacagcttctgggacagaccaaagcaacacagcttctgggaaaggtcctgttttggcccttcatcttcagccaggaggaggtccaaatgccagataactgtgcaccttccctgtaagaggtgagcttgcctgcagagactgctctgacaactgaaactcagaggagagacctagtctcccaggtctgctgatagagggtaacagcatcaccagaggaacaatctctaaacagagacaattataacaactaactccagagattaccagatggcgaaaggtaaatgtaagaatcttactaaaagaaaccaagaccactcaccatcatcagaacccagcactccaacttcgaccagtccagggcaccacaacacacccgaaaagctagacccagatttaaaagcatatttcattatgatggtagagaacatcaagaagggctttaataactcacttaaagaaatacaggagaacactgctaaagagctacaagtccttaaagaaaaacaggaaaacacaaccaaacagatagaagtccttaaagagaaaccagaaaacacatccaaacaggtgatggaaatgaacaaaaccatagtagacctaaaaagggaagtagacacaataaagaaacccaaagtgaggcaacactggatatagaaaacttaggaaagaaatctagaaccatagatgcaagcatcagcaacagaatacaagagatgaaagagagaatcttaggtgcagaagattccatagagaacatcagcacaacaatcaaagaaaatggaaaatgcaaaaagatcctaactcaaaacatccaggaaatccaggacacaatgagaagaccaaacctatggataataggagtggacgagaatgaagattttcaactcaaaggaccagcaaatatcttcaacaaaattatagaagaaaacttcccaaatctaaaaaaaagagatgcccatgaacatacaagaagcctacagaactccaaatagactggacgagaaaagaaattcctcctgacacataataatcagaacaaaaatgcactaaataaagatagaatactaaaacagtaagggaaaaaggtcaagtaacatataaaggcaagcctatcagaattacaccagatttttcaccagagactatgaaagccagaagagcctggacagatgttatacagacagtaagagaacacaaattccagtccaggcttctatacccagccaaattctcaattaccatagatggagaaaccaaagtattccacggcaaaaccaaatacatgaattatctttccacaaatccagcccttcaaaggaaaataatagaaaaaaaccaatacaagtatgggaaccatgccctagaaaaagcaagaaggtaatccctcaacaaacctaaaagaagacagccacaagaacagaatgccaactctaacaacaaaaataaaaggaagcaaaaattaccttttcttaatatctcttaatatcaatgaactaaattcccccaataaaaagacatagactaacagactggctacacaaacaggacccaacattctgctgcttacaggaaacccatctcagggaaaaagacagacactgcctcagagtgaaagtctggaaaacaattttccaagcaaatggtctgaagaaacaagctggagtagccattctaatatcgaataaaatcaactttcaaccaaaagttatcaaaaaagacaaggagggacacttcatactcatcaaaggcaaaatcctccaagaggaactctcaattctgaatatctatgctccaaatgcaagggcagccacattcattaaagacactttagtaaagctcaaagcacacattgcacctgacacaataatagtgggagacttcaacacaccactttcatcaatggacagatcatggaaacagaaactaaacagggacacagtgaaactaacagaagttatgaaacaaatggatctgacagatatctacagaaaatttcatcctaaaacaaaaggaaataccttcttctcagcacgtcactggaccttctccaaaattgaccatataattggtcacaaaacaggcctcaacagatacaaaaatattgaaattgtcccatgcatcctatcagaccaccatggcctaaggctgatcttcaataacaacataaataatggaaagccaacattcacgtggaaactgaacaacactcttctcaatgataccttggtcaaggaagaaataaagaaagaaattaaagactttttagagtttaatgaaaatgaagccacaacatacccaaacctatgagacacaatgaaagcatttctaagagggaaactcatagctctgagtgcctccaagaagaaactggagagagcacacactagcagcttgacaacacatctaaaagctctagaaaaaaaggaagaaaattgacccaagaggagtagatggcaggaaacaatcaaactcaggggtgaaatcaaccaagtggaaactagagaactattcaaagaattaaccaaacaaggagttggttctttgagaaaatcaacaagatagataaacccttagctagactcactagaggtcacagggacaaaatcctaattaacaaaatcagaaatgaaaagggagacataacaacaaatcctgaagaaatccaaaacaccatcagatccttctacaaaaggctatactcaacaaaaccggaaaacctggatgaaatggacaaatttctagacagatacctggtaccaaagttaaatcaggatcaagttaacgatctaaacagtcccatataccctaaggaaatagaagcagtcattaatagtctcccaaccaaaaaatgcccagaaccagatgggtttagtgcagagttctaccagaccttcaaataagatctaattccacttctgcataaactatttcacaagatagaagtaaaaggtactctacccaaatcattttatgaaggcaaaattactctgatacctaaaaaacagaaagatccaacaaagatagagaacttcagaccaatttctcttatgaatatagatgcaaaaatactcaataaactctcgctaaccgaatccaagaacacattcaagcaatcatccatcctgaccaagtaggttttattccagggatgcagggatggtttaatatatgaaaatccatcaatgtagtccattatataaacaaactcaaagacaaaaaccacatgatcatctcgttagatgcagaaaaagcattcgacaagatccaacacccattcatgataaaagtcttggaaagatcaggaattcaaggcccatacctaaatatgatgaaagcaatctacagcaaaccagtagccaacatcaaagtaaatggtgagaagctggaagcaatcccactaaaatcagggattagacaaggctgcccactttctccctacctcttcaacataatacttgaagtattacccagagcaattctacaacaaaaggagatcaaggggatacaaattagaaaagaggaagtcaaaatatcactttttgcagatgatatgatagtatatataagtgaccctaaaaattccaccagagaacgccaaaacctgataaacagctttggtgaggtagctggatataaaattaactcaaacaagtcaatggcctttctctacacaaagaataaacaggctgagaaagaaattagggaaacaacacccttctcaatagtcacaaataatataaaatatcttggcatgactctaactaagaaagtgaaagatctgtatgataaaaacttcaagtctctgaagaaagaaattaaagaagatctcagaagatggaaagatctcccatgctcatggattagcaggatcaacattgtaaaaatggctatcttgccgaaagcaatctacagattcaatgcaatccccatcaaaattccaactcaattcttcaacaaattagaaagagcaatcttcaaattcatctggaataacaaaaaacctaggatagcaaaaactcttctcaaggataaaagaacctctggtggaatcatgcctgacctaaagctttactacagagcaattgtgataaaaaactgcatggtactggtatagtgacagacaagtagaccaatggaatagaattgaagacccagaaatgaacccacacacctatggtcacttgatcttcgacaagggagctataaccatccagtggaagaaagacagcattttcaacaaatttttgttgttatcatgtagaagaataagaatcgatccattcctatctccttgtactaaggtcaaatctaagtggatcaaggaacttcacataaaaccagagacaatgaaacttatagaggagaaagtggggaaaagccttgaagatatgggcacagggaaaaaattcctgaatagaacagcaatggcttgtgctgtaagatcgagaattgacaaatgggacctcatgaaactgcaaagcttctgcaaggcaaaagacaccatcaataagacaaaaagaccaccaacagattgggaaaggatctttacctatcctgaatcagataggggactaatatccaatgtatataaggaactcaagaaggtggactccagaaaatcaaataaccccattaaaaaatggggctcagaactgaacaaagaattctcacctgaggaatagtgaatggcagagaagcacctgaaaaaaatgttcaacatccttaatcatcagggaaatgcaaatcaaaacaaccctgagattccacctcacaccagtcagaattgctaagatcataaattcaggtgacagcagatgctggcaaggatgtggagaaagaggaacactcctccattgttggtgagattgcaagcttgtataaccactctggaaatcagtctggtggttcttcagaaatctggacaaggtactactggaggatcctgcaatacctctcctgggtatatatccagaagatgttccaactagtaagaaagacacgtgctccactatgttcatagcagccttatttataatagccagaagctggaaagaacccagatgcccctcaacagaggaatggatacagaaaatgtgatacatttacacaatggattactactcagctattaaaaataatgaatttatgaaattcctaggcaaatggatggacctggagggcatcatcctgagtgaggtaacacaatcacaaaggaactcacacaatatgtactcactgataagtggatattagcccaaaacctaggatacccaagatataagatacaaattgctaaacgtatgaaactcaagaagaatgaagaccaaagtgtggacactttaccccttcttagaattgggaacaaaacacccatggaaggagttacagagacaaagtttggagctgtgacgaaaggatggaccatttagagactgccatgtccagggttccatcacataataagcttccaaaagctgacaccattgcatacactagcaacattttgctgaaaggacccagatatagctgtctcttgtgagactatgccagggcctagcaaacacagaagtggatgctcacagtcagctattgaatggatcacagggcccccaatggaggagctagagaaagtacccaaggagctaaagagatctgcaaccctataggtgtaacaacattatgaactaaccagtaccccggagctcttgactctagctgcatatgtatcaaaagatggcctagtcggccatcactggaaagagaggcccattggaca

SEQ ID NO: 92 - DNA, 1685 bp, Mus musculus
tgaattctagggaaacgtagaagagcaatcatccagagaggggctctgatagagctccctggccactgtctgctcttttcagaagtctggactccctgacctccaaggcctcctcaagctaaagaacgcttctctgtggaggtgagcatcgcagatgttttgcacatgaaccctgaagggagcctctgatctattgcctgtagcaagaagaagggccagcctgaagcaaaacatgtcatctgcacttgcttacatgctgcttgtcctcagcatcagcctcctgaatggacagtcaccacctggaaaacctgaaatccacaaatgtcgttcccctgacaaggaaacattcacctgctggtggaatcctgggtcagatggaggactccccaccaattattcattgacatacagcaaagaaggagagaaaaacacctatgaatgtccagactacaaaaccagtggccccaattcctgtttctttagcaagcagtacacttccatatggaaaatatacatcatcacagtaaatgccacgaacgaaatgggaagcagtacctcggatccactttatgtggatgtgacttacattgttgaaccagagcctcctcggaacctgactttagaagtgaaacaactaaaagacaaaaaaacatatctgtgggtaaaatggttgccacctaccataactgatgtaaaaactggttggtttacaatggaatatgaaattcgattaaagtctgaagaagcagatgagtgggagatccacttcacaggtcatcaaacacaatttaaggtttttgacttatatccaggacaaaagtatcttgtccagactcgctgcaagccagaccatggatactggagtagatggggccaggagaaatctattgaaataccaaatgacttcaccttgaaagacacaactgtgtggatcattgtggccgttctctctgctgtcatctgtttgattatggtctgggcagtggctttgaagggttatagcatgatgacctgcatctttccaccagttccggggccaaaaataaaaggatttgatactcatctgctagagactggctctccaagcaaatacaaggtggatccacgcctggcccttcctggacgattccaaaaactggacaatgaaggggaacttgactactgaagcagcagactcaaatatgagcctctcaaaatgggttccaccaccatcgtggccaaatgctgagaacaagacagaattttcccagtgccaataatctagtctcaaggatgcctgcctggttagactttaaattttgctcagtgacaaatgagatcagtgttaattgtggttttggagcagctcatgtttgctttcttttagctcagcctcagccttctgccaccttgttcccccaatttcacatggtgatagctctgtctccatgtgtctctctctgtctctgtgtgtctctctgtctctgtgtgtcactctctgttcctctgcatgcttctgttcctctgtgtctttatgtcctctctctctctctctctctctctctctctacctgtctctctctctttctctctctctcatacatacatacacacacacacacacacaaacacacaaagaggagtttatttttcagtttacaaggctctgtctgttcacaactgtaactgcagtgtgggttttctga

SEQ ID NO: 93 - protein, 306 aa, Mus musculus
MSSAYMLLVLSISLLNGQSPPGKPEIHKCRSPDKETFTCWWNPGSDGGLPTNYSLTYSKEGEKNTYECPDYKTSGPNSCFFSKQYTSIWKIYIITVNATNEMGSSTSDPLYVDVTYIVEPEPPRNLTLEVKQLKDKKTYLWVKWLPPTITDVKTGWFTMEYEIRLKSEEADEWEIHFTGHQTQFKVFDLYPGQKYLVQTRCKPDHGYWSRWGQEKSIEIPNDFTLKDTTVWIIVAVLSAVICLIMVWAVKGYSMMTCIFPPVPGPKIKGFDTHLLETGSPSKYKVDPRLALPGRFQKLDNEGELDY

SEQ ID NO: 94 - DNA, 2356 bp, Mus musculus
tgatcatgcgaaacggatccgggagaaatcagacattaccttgtccaccttttctctgcattctgattcccccaactatctccgtcaccttataaaactggcaggctctggaccttttgcacgctggagaaaaatcactgttttgcctccagcaaggaacatgcatgttgcaacactgactcctcctctagtgaagaaagagtgaacaagtgcaccgagttgagcttcttctcagagacacgcggctggcgacggcagagcagaggctaaaatccccagactgccgggtcttctgagctgggctttccccgccttcctgctctgtctcactcactcctctcctgcgttctggattttacacggggctcaggaaacagctttacctgtcactgaaaaagctcgcgttctttgcaagaagtgctcaatccctggtatggcagacttttctctccagcagaagtgagtacccatggagcctctgatctattgcctgtagcaagaagaagggccagcctgaagcaaaacatgtcatctgcacttgcttacatgctgcttgtcctcagcatcagcctcctgaatggacagtcaccacctggaaaacctgaaatccacaaatgtcgttcccctgacaaggaaacattcacctgctggtggaatcctgggtcagatggaggactccccaccaattattcattgacatacagcaaagaaggagagaaaaacacctatgaatgtccagactacaaaaccagtggccccaattcctgtttctttagcaagcagtacacttccatatggaaaatatacatcatcacagtaaatgccacgaacgaaatgggaagcagtacctcggatccactttatgtggatgtgacttacattgttgaaccagagcctcctcggaacctgactttagaagtgaaacaactaaaagacaaaaaaacatatctgtgggtaaaatggttgccacctaccataactgatgtaaaaactggttggtttacaatggaatatgaaattcgattaaagtctgaagaagcagatgagtgggagatccacttcacaggtcatcaaacacaatttaaggtttttgacttatatccaggacaaaagtatcttgtccagactcgctgcaagccagaccatggatactggagtagatggggccaggagaaatctattgaaataccaaatgacttcaccttgaaagacacaactgtgtggatcattgtggccgttctctctgctgtcatctgtttgattatggtctgggcagtggctttgaagggttatagcatgatgacctgcatctttccaccagttccggggccaaaaataaaaggatttgatactcatctgctagagaagggcaagtctgaagaactgctgagtgccttggggtgccaagactttccccccacttctgactgtgaggacttgctggtggagttcttggaagtggatgacaatgaggacgagcggctaatgccatcccattccaaagagtatccgggtcaaggtgttaaacccacacacctagatcctgacagtgactctggtcatggaagctatgacagccattctcttttgtctgaaaagtgtgaggagccccaggcctacccccctgccttccacatccctgagatcactgagaagccagagaatcctgaggcaaatattcctcccaccccaaatccccaaaataacacccccaattgtcatacagatacatccaaatctacaacatggcctttaccacctggccaacacacgcgcagatctccttaccacagcattgccgatgtgtgcaagctagctggaagtcctggagatacactggactctttcttggacaaagcagaggaaaatgttctaaagttgtctgaagatgctggagaggaagaagtggctgtgcaagaaggggccaaaagcttcccttctgacaaacaaaacacatcttggccaccactccaggagaaaggccccattgtctatgctaaacccccagattacgtggagattcacaaagtcaacaaagacggagtgctatcattactccccaagcagagagaaaaccaccagacagaaaaccctggggttcctgaaaccagtaaggagtatgccaaggtatctggggtcacggataacaacatcctggtgttagtgccagactcacgagcccagaacacagctttgcttgaggaatcagccaagaaggttccaccatcgcttgaacagaaccaatctgagaaagatctggccagctttactgcaacctcaagcaactgcagactccaactgggcaggctggattacctggatcctacgtgcttcatgcactcctttcactgagagc

SEQ ID NO: 95 - protein, 604 aa, Mus musculus
MSSAYMLLVLSISLLNGQSPPGKPEIHKCRSPDKETFTCWWNPGSDGGLPTNYSLTYSKEGEKNTYECPDYKTSGPNSCFFSKQYTSIWKIYIITVNATNEMGSSTSDPLYVDVTYIVEPEPPRNLTLEVKQLKDKKTYLWVKWLPPTITDVKTGWFTMEYEIRLKSEEADEWEIHFTGHQTQFKVFDLYPGQKYLVQTRCKPDHGYWSRWGQEKSIEIPNDFTLKDTTVWIIVAVLSAVICLIMVWAVKGYSMMTCIFPPVPGPKIKGFDTHLLEKGKSEELLSALGCQDFPPTSDCEDLLVEFLEVDDNEDERLMPSHSKEYPGQGVKPTHLDPDSDSGHGSYDSHSLLSEKCEEPQAYPPAFHIPEITEKPENPEANIPPTPNPQNNTPNCHTDTSKSTTWPLPPGQHTRRSPYHSIADVCKLAGSPGDTLDSFLDKAEENVLKLSEDAGEEEVAVQEGAKSFPSDKQNTSWPPLQEKGPIVYAKPPDYVEIHKVNKDGVLSLLPKQRENHQTENPGVPETSKEYAKVSGVTDNNILVLVPDSRAQNTALLEESAKKVPPSLEQNQSEKDLASFTATSSNCRLQLGRLDYLDPTCFMHSFH

SEQ ID NO: 96 - DNA, 203020 bp, Homo sapiens
tggtgaaagcttcatttatttattgttttccttctcaaactcttccaaaatatctaagaggagagaacacttctaaactgattttatggggccagcattacccttataccaaagccagataaaatgataagaaaactacaggctaatatccctgatgaatatagatgaaaaaatcctcaacaaaacactagtgaaacaaattcagcagcatattaaaaggaccatacaccatgaccaagtgaaatttatccctgggatgcaaggatggtacaacattcacaaagcaatggatgtgatacaccacattaacagactgaaggatgaaaatcacatgatcatctcaacagatgcagaaaaggcatttgacaaaatccttcaccctttcataacaaaaagtctcaacaaactaggaatagaagaaaaacatctcaacacaataaaagccatatatgaaaagcccaaagctagcatcattcttaatttgtgaaaaactgaaatatttttctctaacatcagaaaacaggatgaggatgcccactcttacaacttttattcaacgtagtattaaaagttctagccagaaaatttggcatgaaaaagaaataaaaagcatccaaatcagaaaggaaaaagtaaaatcgtcactatttgcaacagatactcaacaccactaatcatcagagaaaggcaaataaacaccctaatgagatatcacctcgtatctgttaggacagctattatttaaaaaattcaaaagataacaatggtgatgatgtagattaattgaaatgcttgtacaatgttgacaggaatgtaaactggtgtgaccgctatgggaaactgtatggaagctctttaaaaaattaaaaatagaactaccatatgatcccacaatcatactactgggtatatagccaaaagaattgacatcaggatctcaaagagatattaacaatcccatgttccttgtgcatgattcacaatagccgagatatggaaacaacctaaatgtccctcaatggatgaataaagaaaacgtggcatatatatacaatggaatactgttcggccttgaaaaaagaaaaaagaagaagaaaatcctgccatatgtgacaatatggatgaacctggaggattttatgctaagtgaaataagccagtcacagaaggacaaataatgcatgatcacatttatatgaggttttctaaaatattcaaactcacaggagctgagagtacaatggtgattgccagaggctgttgggacaaaagaaaggggaattttgttcaacaggtagaaagtttcagttatgaaagatgaataagttctagagatctgctgtacaacattgtgcctatatttaacagtactgtattgtacacttacaattttgttaagagggacgatctcatgttaaatgttcttattacaattaaaaaaaaacaaagaatattcactacatatcagagacctcattggaaatttacctgacagtgtgttctcagtcatatgattcttcagtgttacaatctggtaagtggaatttgtgacatcagcctgcccttatatctcccctaacaagttagagttggagacgcccataaatttgagtcagtttccctgggtgccaattggagacttcaggaagaacattcactttacagtcacttggggtttaggaactctggcactagagcagcacttctcaaacttttacatacatgtaatcacctggagttcttgttaaaaatcagattctgatccagtgactctgaggtggagccaggtgttggttctcatttccaacaaactctcaggtggtgcttctggatccagctctgggttgtgaagcactagaccactggcctttgaacccttgtgtccgtcaagtgctgggctagctgcataagagtcttctgggaaaacatatcaaatacaattgcctaggctcttcttccccagggacacatattgaataggcctgcaatggggccttggaatttgcattttaatggccacctcatgttattctgatgcacagctatgtttgagaattatggctctaaagcaaagctctccaagaaagaagtacatacctaggtatacaagatgatccagtgagttgaagtatgaaaataatatagtagttatttggggtattttttctaagaaagaaactaatctttactggtatttagattgacaatagtgccttcactgagttctcaaattagctcaacacaagttctggaaactacacaagataatctccagaatcaaaaagagttcagcaaacacacaggggttgccatggtacctccactgcttgattgccatttatgtgctacaggttttcatcaatgcagtttattttataaaagcaagacctttagaatatgcaacttgacaaaatagggagtgagtatgaaaatgtctggtaccacacagaagtttcttgtttaattcatgacgaagtagtaaaaaagttgttggatttaaaaatgagttgtccatttccttttacaaaacgataattgttcccaaagtgtaaatctcaaatgcatgatgctgagtgaaagaatgctacatactgtacaattctacttacatggcagcctggaaaagggaaactataaggatagagaacagattaatggttgccaggggacagggtagggacagggtttggctacgcagaagcatgagcgtattttgaggggccgggctgcggggcggtggggtgtgcgggagtaatgaaaccattctacacctacattgtgatggttatgtgactttttgcatttgtcaaagctcctagagatatacactaatgagtatgaattttatagcaagttacaccctaaaaacattcacttaaaaaaaagtaagttttgctgaacaaaaagaaaatttctaccacctttcatgcagtatatttttcagccataataggtgtaaaactaaaaactgaaaataaactaaacttagaaccagatctgcatatcactgtgtctcaaagtgttaagccaacatctttttttttaaaaaaagcatacttaatcacattattctcattaaaattttgataattaataatttcagaactaaatggtttataccattaaaaataaaattatttatttattattttaaataattttgacttttattttagattcgggagtacgtgtgcaggtttgttacatggatgtattgcatgacactgaggtttggggtatgaatgatcacgtcatccaatgagcgcagtaccgaataggtagttttcagtccttgccccgctccttcccttcccttctagaattcctcattgtctattgttcctatctttacgtccatgcatactcaaagtttagctcccacttataatagagaacatgaggtatttggttttctgttcctgcattaatttgcttaggataatggcctccagctgcatccatcttactgccaagtacatgatttggggtttttatggctgtgtagtattccatggtcaaatttttgtttcatcttatttcattcttttaaaatttctactttcattcatttataatacagtagtacatatatataatttatgactaaaaatacatatgtatttggaaaggcatgctaaaaatgattttactgctaagatgataaacagaaaactttggaggtcacttctctagaaaataactcttcaaaatttaatgtacgtaggaactacctagggatcttgttaaaatataaagtctgatgcagcaggaagtctctcaccagatcaaatgctggcaccttgatcttggacttcccagtctccaggactgtgagaaataaatttatgttctttataaattaaagaaaaaatacaaagtctgattcacaaagtagggatggggtctgagatcttgcatttctaataagattatgattaatctaataagttgaaatcatttgttttggtttaaactaattaccaagtcaattcattctaataccttccgggttcactcatagactaggcctagggttaaaatgataattagtatgatgccagtgcacctggccctaagactatactttgaatagcaggactcagaccacagtagcccgaagacatctatgcagctattatagagactaacaactgctgcatttgattcagcagactcagttttccctctttgggtttgggagacatgaattcttatcagtcaataggccagctctcttagcatcttcccatggagcaaatgattcccattcccatgctcataaaagctgattttacttaggtcactgcttatccaccagcgtgggtttccttagaaggaaggacacattgtctaataatagcagtgccttatatttacacatggtttataattaaccaaatgtcaactcatatcagcctcacaatgacctttggaggtagaacaaagcagatgtattataaacccatttgcaagtgctacatgacagaagcaagcacagtgctttctttcagagttggagtgatcaggcaaagctttaagaagaaagtaccatggagtctgaagatcaagaatgggtaaggtttttagatgaagggtgggaaataacattccaagaagagaggatggattcaaacacactgtagatatgtattgagctactactactctaaagcccaatgaaatcagcaggagtaaagatgttctaactttattctgtgggaagtagatgccattaaaaatttttaattcagggactaatgtaatcaagtttaccatgaaagcatttgagtttgatgtaggcaagactggtgaagatgagtccagccaggggggctattgaagaggaagaagtaaaaaatgatgaaggcacaaattgaggcaataacagtggaagggacaaaaatatttaaggacttcattccttttttttttttttattatactttaagttttagggtacatgtgcacattgtgcaggttagttacatatgtatacatgtgccatgctggtgcgctgcacccactaactcgtcatctagcattaagtatatctcccgatgctatccctcccccctccccccaccccacaacagtccccagagtgtgatattccccttcctgtgtccatgtgatctcattgttcagttcccacctatgagtgagaatatgcggtgtttggttttttgttcttgcgatagtttactgagaatgatgatttccaatttcatccatgtccctacaaaggacatgaactcatcattttttatggctgcatagtattccatggtgtatatgtgccacattttcttaatccagaaggacttcattcctaattggatgtagagtgtaacagagagaacactgacagttgaagccataaaaaaaaaataataagcttttatatctcaaggcccataaacaagtgcatgccctttgacctagttgggcctcacctggtgttttagacaaaggaaattaattcccaaaggcaacttttttttctacacttcccataagtatgtttattacagcattatttataagagtaaaaatttgggaacaatctaaatgttcataatatagaatgattacataaattattgtgcaaaaagattataatgataagattacattaaaaaattgaaggatacttttaaaaagatataaatagatatatttcctggatgggaagaattaatgccctaacaatatcaatttttctcaaattaatatataaatgtaatgtaatgccaaaaaaagattttgaattgaacaaattgaccctaaaattttatgaaaaaataaatatagtggacttatcaagacaatttcaaaaggaaagtgacagtgtgctttgcactaacaggtattgtactgtttttacagttacagtaaacaaaagtctatatttttggcatataaataggcatctcaaagaaacagagtagtgtcccgaattcatataaatatatatcaaaatgtaacacatgatatgtgacactagaaatcagtggagaaattatgaatttttctataaggggtaaaattaaaaataaaattcaggagaaaattaactgtctaccttatgtaatagttaaagatctattaaaaaaaaaacaatttaacagagttaattgcaaagaagcaatacaaaaaacccaaaagctgtaacagaaaataattgacagatttgagtacatgaaaattaaaaacttttgtgcaatgaaacagtccataaacaatatcaaaggaagcctgacaggcacaaatgtttgctatacattgaacaaagtgttagtatgtttaataataaaagagatgccaaaaattaattttaaaaaatatggaggccaggcacggtggctcacgcctgtaatcccagcactttgggaggctgaggttggtggatcatgaggtcaggagattgagaccatcctggctaacacggtgaaaccccgtctctactaaaaatacaaaaaattagccgggtgtggtggcaggcgcctgtagtcccagctactcaggaggctgaggcaggagaatagcgtgaacctgggaggcagagcttgcagtgagccgagattgcaccactgcactccagcctgggcaacagtgcaagattccatctgagaaaaaaaatatatatatatacgggccaggtgtggtggctcacaactgtaatcccagcactttgggaggccgaggtgggcgaatcaggaggtcaggagttcaagaccagccaggccaacatgtgaaaccctgtctctattaaaaacagaaagaaatgctggtcgtggtggtgggcacctgtaatcccagctgctcaggaggctgaggcaggaaaattgcttgaacctggaaagtggagattgcagtgaaccgagatcatgccactgcactccagcccaggtgacagtgcaagactccatctcaaaagaaaaacaggcataagattgaacagccacaacataagagaaaaagtcaaaatataataagcacatgaactcaaccttgaaggcaatcagaacactgtgaattagaacaacaatgagctatcatattttgcttatcagactagcaagataagattgataaagtccagtgctagcaaaaatgtgagtaaacatccttggtaagagtggacactgaaacatttgtggataaaaattggaggtatatatgaaaatttaaaatgttcctaccctgtggctcagtaatctcatttctagggctttctccaacaacatatttggagagcaatttggtagctatcaaaattttaatgttcattctctttgagccaaccaagtcatttattttttattttatttatttatttatttatctatttatttttttgagacacagtctcaatctgttgcccatgctggagtgccatggcactatctcggctccctgcaacctctgcctcccaggttcaagcgatcctctggcctcagcctccctagcagctgggactacaggcgtgcaccaccactcctggctaatttttgtatttttagtagagagagggtttcaccatgttgggcaagctggtgtggaactcctgacctcaggtgatctgcctgccttggccttccaaagtgttgggattacaggcagacgcgagccaacctgcctgccaatcaggccattctaagtatctatcctaaagtccatgcaaagacaatcctagcagcacttcttaaaataaaaagctggaattactaaagacctaacaatggaagaatggtagaatatattacaaactatgtaaccattaaaaaaaaatggagtaaatctatacatagttacctggaatatgtgatttcattaagtttaaaaaagaaaagtcacagaaattattgcattttgaatttttaaaatatttgcatgtgcatacagagacatgactatatacacatgtaaaaaaggaggcaaccaccaatacgtcaatggtggttacctctgagacaggattagatgaaggaaggaggatgtgtgatttggaagtactatattttactgtatagataaagatgtagatttctttttaacagtgctaggatttggggtagttttttaatctttggatatttttagcagttttctattttttttctaaagaaagaaacatagttctcccacatatggacatgccattcttctgaggatgcttaagttgaccccaggaggagccctagctgctgttccccattagaggccccttttcagcaggaagtagccagaaagagtccttgcccaaaaccccctaacagcagttagtgtgatatcgccacagggaggaatgtggcatgagttatcaagaaattattttaggcagatagagagtaaaaggggtccttgggaagttttcattttttaaagtatctccagaaaagtttcttgtaaaaccccggcttttagagccaggcgggcaacctttgatatgcaaacctaggccattagaaactgggttcacccaaacatgccgattccagggaccttcttgcccttgccccacatgttcctggcaacatggccgcccccacatatccctatttgtgtagaacatcatggcgccccgcatttgcatattaaaaggctagagtgggagggccagctctttcatgggctacgtgaattacgtgcctagtcaaaccaatcccctgagccctaggcaaatcaaacaccgcctcctccagcctctgcttatatacctggctggtatccgcagcaagtggggacttactcttttggctttggagcgcccccctccctctgtctctgtacagggaagcttcttctttcttccttctccctttccttcttgacccttcttgcctattaacctctccactccttaaaaccaaaaaaaaaaaaaaaaaaaaagaaatgtggttctcaaagaagacaaatgaagtagcaatgataaaactccttccctatttgagaaggaggagagagaaaaggagccacggcagaaaccaacagaggaatgccacagacagaggggaggctcccgccagaggatggcagaggcctggaagccaaggcgtgagaacttcaagaggaggaagtgaaccgaagcccagtgctgcagagaggcctggagggccctcccagagagcagccagtgagtggtagtgatgaaagccaggtgcaaagaattcaagggagccattttccaccctgcctgtgcatttttgtaaaaacagagaagtcagagccccattctaaacctcctgcattagaagctctgcaagtgacacccagacacagtacattttaaacactcaggtgattcttgttcacagccaaggttgagaaccagtgagttaaggcactgagagggaagtaagtaaggaaagctggtgtgcgtaagtcattctttcactaagattggcaggtaaagaaatgagtgaattaaactgtaaagccatcaaaagggtcaaagaagatgtagaagttgtaggttgagataaagaagcctatggggcagaaaagattaaatatgcaagaaaggtagaggaaaggggaaggaaagaaaggaacttgatgtttctagactttgttagatggcacacattttacatatgccatcaccattattattcatttgactggatttttgaggcacatgctactgtgtccaatttacagtgagaaaccaagaatagcaaggacctaacccagtgccagtgctgggctcttcctctgcatcaggctgagaagcaaggtcttggaggaagtaaacggatatggagtccaggactcaggtagggagtcagcttgcaaaggacgaacacgtccgctaagacagagatgcagaaatgaactagaggaggacatcagtaaagaagctgtgaagctggagcacatcagtgcatagagagaaggagatagtcaaagaaccactgtggggcagaaaaggaaaatatagtggctcactgcggatttcatcatctcaggaaagctggggcaaggtaactcactgacaatgagtacccgtggctttgtgacagtgcctgtgtgctacacaacagagcagaaagccagccctgcccttcttaccagtgaggtatggattagccacgcaacgaccagtctgtaagccaggagtacagacgagccaagctgcctgcagctgagtgggaaccacaaggaggaaaagccaagtccctgccttctaagagctgacagtctggagttacccagagtgatcttctatttcactaactgttaaaatagtctgattagaacaactattgtagaattgagtgaccctttgctttgcaaaggtcatatagaaatattctgccactgaggatctcatgtcgcccagtggttctgaaaataaatagaagttgcgtaccttcatggacacccatgaatgaaagtaaatataccctaatcatcacaggaagcatgtgcggtctgcacgtgaaagatgcatctcccatcagctaacagaaccaggtggagtctatgttttaataaggacgtgttattgatcgggaagtattaggttattatgcctaggtagttgcttctgggattccagtccaaaaggatcaccaaagcatcatgggattttcaatggcttcctgtggcttggcaaatgctcactgctaactgtgatttcccagttatccagagtagcagtcaaatcaaaggggaaagcctcatgtttcaataacttaaaacaaaacaaaaaaaaaaacggccaggcgcagtggctcacgcctgtaatcccagcacttcaggaggccaaggtgggtggatcatgaggtcaggaaatcaagaccatcctggctaacagggtgaaacctcatctctactaaaaatacaaaaaactagccggacatggtggcacgcgcctgtagtcccacctactcgggaggctgaagcaggacaattgcttgaatccaggaggcagaggttccagtgagccgagatggggtcactgcaatccagcctgagcgacagagcgagactctgtctcaaaaaaacaaacaaaaacaaacaaaaaaaaaaactcagtaaccttggtttaaagtatttccttggtggccctctgggttgtgtaacaatcggatgcattaattattatggcatcaaatgacaccagcaacatacatagtcagaaataactatttgattcaggcaggtgctattatttgtttcagcactgttaaatgtggggtttttgtttttgcaagagaaaaggcggttgtgtgtggtttcaagaagaagaaaagtcagaacaacatgcagcccattagaaaagataaattctttatttgtggaaaacaacagaagtggggctatttaggcaccgccaatgtttattatattcatatggcagagaataaacacagcacactagaagtttgcgctttgggtattaaaaaaaaaaaaaagcaaaaccttcttaggtcactgactatcttcttttgctcctttctatctgactcctcaggcaaggtgcaattcaaatccctggagaacctctcaaatatagctgctgttcaatgttactcagaaataaggaaagaaatttgacacggagacactccacatcttggctgcctggaaaaatatcatctttgaggtcattcaactcactaagtcatttttattattgttttgtctgtctattttctggtacagtctcaatgaaagatatgtggccctaatcatgcaaaaccgatctggggggaatcagttgtttcttcaggtcttcgcaggattccagctcccccaactacctccgtcgccttctaaaactggcaggctctggacgttttgcatgctgaagaaaatcactgttttgcctccagcaaggaacataaatgttgcaacactgactcctcctctcatgaagaaagagtgaacaagtgcaccgagttgagcttcttctcacagagccaccgggctggggaccggggagcggaggctgaaatccccagacgccggttttctgggctgggctttctgccttactcactccttctccctctttctggattttaccgaccgttcgcgaaacagctttccacacaatggagcttcatgtcctcgtgcaggaagtactcatcgactgatgtggcagactttgctccctggcaaaagtgagtacccatggcgagctgaggccgcctccgacggcgcgcggcaggggctgcgcgggcggccgctctccgggatgcgggttcgaggcccgcgtgctgaaggggagagcggggccaccggcgcgggctcctggagagaacgccagccaggagccagagtcggcagccggcggggaagcccgggatccgcccgcctcccgcccggatgtcccttctcagaggggctaaaaaatactcttaaggtgctttgcctccaccactgcccccaaccccagcttttacaaactgcactcggctcgcattcgcctttgtcaaaggcatcttcacctgtatccttgagcatgagtttcggcgttgattgtgggattctcagaatgcaaattatttgcgtcaaaataaaaagaaaagaaaaaaagagcggggagggggaaggggcgcagacaggtgatgtgatgaaagccggactcgagactctcccatcagcagcagccgccgccgcagcagcctcgcgggcatccggcggggaaagtttagggttagcaatgctgacctgaaaggtgttgctcctcccaaaagtcagcgggggtaggggcagatgagcagcctccgggccagaagccggagctggacggaggcacctaggcagaggaattgcagcccgggaggaagctggaaggagagcccgctggagaagggaggagggaagggaagaggagttggttaaagtcaggcaaactcaggtaactggagggccggcccgagtgctacggcaggggaaggcaagggctggagttctggctctttgagtagaaaactatccttttagtgacctctacctgtatcctggggaagcaacccacactgccctgaaaacaagcaacgtaggggattctatgactggacttgaaaatggttgcaaaacattattattagtctggagggatcactttgtcttcatttgtcaagttgaccgggcaagatttcccacctgaaatcgtgcttcacttgaccagggaagtgctgctaatcccaatcctgaccatcagctgtgcaaacttgggcaagatacttaccctctctgggcttcgattttttttctgcaaagtttagggaattaattaattatatatatatattatagaaatatatataatatatatataaatgtttaatgaggtggaagtgctgaatagtgcaagagaggagcagatgaaaatattaatttcagtggttcttaaaaattaggggtgataggtccttttgagaattagctgtgagtcctcttcctgggggaaaatgcatatggcatgtacataaaattttacatgcaatccctgagggtttgtggatactccctgaaagccatgcctgaatcccaggtgacaatcccttattcctcctcctgtatcaagaccacccagccaactccttgctgctggttgggctgactgtgggagtaatccacagccttcttgggggtctggagtcagccacgctgctgaaggagacagctcccctgtcatgggtgagctccccacatgctctctccagagctctaccagcctctgactccaggggacccctcctcacaaccctttttaatgactctcctaaggcgacagtccttacccctagaattttcagtcccaccaaccctggagagccatctaaagaggatcgctgtctgaatcagagtgctcttcaggtcacctagctggatggcagggaggccaaggctttgtttggaaatgaagcagtctttgctccctgaggcatagtatgagtaggcagccatattcttttgaacctctgtactttgcctttagaggactaaggactcacatctctggggaccctgggtgttccactagcagtgccagcaaggcacatcagaaaacacacagggctttggagctcaacagactgggcttcagatcttgactcccacactgagcaagcctctgagttttcctgagcttcacttttcctgtcagcacaatgaaaataatgctgctttttttttttttttttttttgcatggttgttgggagaatggaaatactatgaatcatgcctagcccatagtcaatgataaactttttcttaatattaatgtggcaccataaataagtgttcaatagtctcatgcttttaagaacagcttactctctctctcctatggggcttacattagtagaagaatgagtaaaattagttctggtctagttatgcacaaaaaggagtggtggcctcagaatacagagtcagactggctgttcgaattgtgcagtgtcaaggagagcactatgtattgccggcaagtaaagtatgtccagaccggcgtggatacttgacctgtctctcagttctcttttgacccataatcttgagtacaaaacagctagtgctgtgcctgcagctaaaaacagccaggcatggaaagaagtgttgtggctgggtccatcttcagaaactgtagagagaaatatctccattgtcatctttcacagtttggcacagatgtagccaactcagcatgtactctctctccatggggtcctggtgcctccattgcaagtggtcagatgatgtagcaatgaaagaaggaaacatcggaaacttaaaaggaaattggatatccacagagtagccaaagatctatcagtatactttggtgaggtattcctgcatgcaaagatagcaatattcatgcctactatttactgagcctttaagatgtgctaagcactttcacacattgcctcaattaattctcatagcaagattgcagagtatgagttatcatttaaagctttaccagtaaagaaactgaaacatggaaatgtacatacaccccccaaccccacaccccacatccgcctagctcaggaaaggcagaaccaggatccaagcccaggtctgtctgactttggcacccactctttttccactacccagtgctcccaagctccccaatatcaggcacttgcatcagccaaccggattaagattcttctaaaaggcaggaatagccaaatctagtgggtgcttttaagtggtgtgaacatgtgcttggcttgtgatacatattaacgggtagcaacaacaagatcacctatgggaggataatattcctgacccttcccaagcccagccattagactcaagattggcaatatccaacattagcaggtgaggctggcgctctgtcactgacttccttggtaatccttttagttaaacagagctctggaatgttcattctctaccacctttagaatcagaacaccacttacctttacctccctgtgctgagcacgttttcattcatttattcgacaagcatttgctgagctctgttttgtgctgggcacttgatgacacagtggggaatgagacacacaggatcccagcccttgtggagcttctatgccagagagagtgacagaaaacagtcgggtgaacaaatacataaataaaatcatttcagatactgataaatgctatgaagaaaatagaggctgaaggctacagagggacagggcgtgggagcaactttcaacagggaagtcagagaagactgccatacaaaggatacccttgaacttaaacccgcattttcaaaaagggagccagccctgtgaaagtctagggaaagggctaccttagcagaactctcaagagaaagttcttaaattggagtaaatgaagcagtaaagcttaaagtctgaagatgggccctttagaagttgacttgtatatagggggaattattatttgaatgcctactatactattctaagctgtgctgtatactctgtttatcttcccaatgatctggtgagttagctatttttgtttttattttacagttgaagaaaccaagagtcatcaaggttaaggagctagtccaaggttatggagctagtccaaggttatgaagctggtatttgaatcccttagtctatttcactccaaagcccacaactacttgctaacacagcatgtgggctttgagataatgtcttttggagaaagtaaggaagccgatagaaggagaatatcaaaagtaaattaagtagctgaatgctgacaacgatttgtatttgatgtcccaaattccagttagtgcacctacaactgaactgtccaatacagtagccactagccacatgtgcctattgagcacttgaaatgtggctatttcatattgagatgtactgtaaatgtacaacgcaccccagatttttaagacctagtattcccccaaaaaagtaaactgtcttggccaggtgtggtggctcatgcctgtaatccaagcactttaggaggccaaggcgggtggattgcctgagctcaggaattcgagaccagcctggggaacacggtgaaaccccgtctctattaaaaatgcaaaaattaggcaggcatggtggtgggtgcctgcaatcccagctacttgggaggctgaggcaggaaagtctcttgaacccgggaggcggaggttgcagtgagccaagattgcgccattgcactccagcctgggtgaaagagtgagactccgtctcaaacaaaaacaaaaacaaaagtaaactgtctcaatttttatattgattgtgtgttgaaatgataatattttaggtatactagtttaaataaaatatattaaaattaatttaacctttttcctttaatgtggcttaatagaaatgtttaaattacatatgtgactcacatgatatttccgttgaacagcactgatctagactaataagttgacaaatacatgataggacctttttcccccttcttccaaacgtgacttcttcctctgttcttgtgtcaggctccttctcatctgcccccatattcagttatttggtgaagcacgagagaaaagaggtccctcttccttctcccccaccctcatgctgctggttagcaggtgatcatttgaagtccactataccatgtcactttgggatctgataaaatagactcagtgattatattcatcaccaagaccaatcctctcactcaggtaaatctcaagaggctttcaaacgtcctacaatgaaagggtcattttaaatctggatttaaagttttacctttaaatcacttcctagtacattgtctttgtagttttgggcactttgtaaaatcagacgaggagacaactagagcttcatgtttttgtgcaaagctcattaaataagtaatctcatgcagtaataaatgtttctccctgtcctcttgcttaaaacagcatgaacaaaaagtagtcccagttgccagaagggctactccaggggcatcacaaaagaccacctttggtttctttcttttgtccactagctaaagtggccctcaaatatgtcaatgaaataaagatatattttttttcctgcagtttcatttatttcaaaaaaaagagcagtcagattctggtattgctggagaaagcctctgaagagcaaagacctggattctgcttttgtgtactctactggtttgcatgttaccctctctctccctttttttcccccaactttctcccttacttcctgtagtaagtttggtgttgatgagataatgccacaaaaaatgctaatggtgaaatgtgctgtacaaattggccatggttatgattgataacctgaatacaaatggcatctctagacatgtgcctgcagggaggagttgcctttatgtagctggagcaaaacattatgtaagattctcttggaataacatttgttcatttccacttgaaatccaaatctgggggaaatggcagtaaagaagctgacaagaatgaatcttagtgtatctgtcactggtagactgagttctttctctagtctgtataggttccagagagagaacacccaattgaaaaaggacaagctggttttattcactggccagaaatggaaaatgagagacctcttgctctaaaaagtcaccttctccctagctgtgggaagctgcaggattgtgatgagttagatgtggggcggggagctatgtaaacacatgcagggagaaagtacagaggcacagacacagataaacatgtttctccatgcgtcctatggagagaaaatggcggcagttttcttctagggatggggagcccagcattgtaacgctatgttaatgacctaaacggaacaaggggtagccagttctggtttgcactggtttcctgcaggcctcttgtatttggcaaaggatcaccaagctcctgcgacatcccaggccatctggagttctttaagcaagagtatctatagataaagaaactagggaagataacaatttaagaaaataatgagctttcccagctatttctctagggctgccctggtaatatttctacatcaacagcaacacatatttttcagcattgtgtaagccaggaaatctatgctagactccacggggaaaatagaagaataaaacatggttcttgctctggaggagcatagttcctagttgggaaggtggacagaaacataaaagaccagtagcatgtaaagaacattttctaagtgttacataaatgatgcaaacaaagttttgcaattctggagggcagcatgcccataacctctaaggtatattaagaaagacaaagtagaaaatgggcattgagggctggaagcctaaagacacaaggagagaaggagagagccacctcacataagaaaaaatgcacagtggtgtggcagtggaaatgtacatgggttcgggggtgcgtgatgtggaaaagaacagttggcttaatccagtggctccagatctgagctttacatcagaatcacctgagaagcttttaaaaattacaaatgcctcagccccactccagagcttccatttaattagtttaagactggggactggtctcagtggtgtttctgattgattttgttttgtttttgtttctgtctcaatttcccagaatattctaatgtgaagtcagagttgagaatcactgagcaaaaaccaagatttttatatcatagtcatgggacataaaatgaaagaagtaatcttttaaaggagattaaatggacaaccaagagtgtgacctttaatttgtagaaactgtatatacatgcacatttgtatgtagtcttttaaattcacagataattcctcgtggtgattctgtctacttggatgatgtggctgaaagcctttgtaaccagctgcctactcttgtcctctgtgtactttgggggtgtcctatagtggatcctagctaagtggggcacaatgggcatctcacaggagcttgtttctaccaggctttttgtaatcattgccaagggctttattatcatgcctaatagtgcccacagtagctattttataagcatctgcaatcttccctcacctctccaactttacaaattgagaaatggagtttaattacttgccttgggccaggagactagctggtgatgaaggtgaaatgagaattctcagggaggtgaaattagaatttccagctactgaattccacataccttattaaactcccaaagtgagtctacccactctcctgttggtgttagaatgttatttcttacatgaatgaatcagtgtcacagatcagtaggtgaagatgactggtttccctaagctgccaacactgtgattatctgagtgtcaatgacccataggcagtcacagtggtcccgagagccccgtccctgatgcctgggagctctcagtctagtgaagtttggccttgcatatttatagtttatccactctaacatctgggaagtgaagactctggttgctattccactgctcctagccccacactttacggctgttctgatttcccttctctgaagctcttgttcactgaaaggatatcagctttttgctacacccctgaaaaaaagaggagaaagcccagcattttaaacagctgcttttttttttcttttggatggagtcttgctctgtctccaggctggagtgcagtggcgcgatctcggctcaccgcaacctctgcctcccgggttcaagctagtctcctgcctcagcctcccgagtagctgggactacaggcacgcgccaccaagcccggctaatttttgtatttttagtagagatggggtttcaccatgttggccaggatggtctcgatctcttgacctcctgatctgcccgccttggcctcccaaagtgctgggattacaggcatgagccattgcacccggccaacagctacattttaaagaatcctttatatgtgttgggagcttctgggttcactgcccacggtgagactaggggtggggacggaggttcttctgaaggacagtgcggggaaaaagccagagtcttggcaatacagcctctttagacaaaaagataggtcaatttgtaccattcccaaatggttgggttttcttttctctgtctcaaaatccattactgatttaaaacaatttccaaaagctttagcaatagcaaaaagcaagcctcttaaacagtgttgctccacactgattgcacgtgagaatcacctagggagctttagaaacaactatagactcactgaatcaatattctgggaaggggcctggacattcgtatttatttacagttctccaggtttataatgtgcatccagggctaagagctactactggtcagctatgatccaaatcttaattacttatttgtatttcttcttttgccttgttttagagtctcatggcccagaaaaccatcaaactatatttttgttgagtagcaatttcatcattctgttctttaaaaaacatgattttgagcataatttaagtttgctacttctatagagagacctcacactcagtagcctcatcactaaaattttctgtgtgcaatttagaaatcacattgccagaagcttgctaattaattatgagactgaaagataaaggttaagctttcctgccacctatatattagatttcccaattgctatgttaatctttagttaaccaagacttgctttcttgtctcagccattttaaagccaattaactctgttcctgttcacacccttattaaaaatataattacagcagtagtctccagggactgtcattgggtaggctttaccaaggtaaattagccaagaaataactaggctgtgtaacaccctctcagaccctggaaatcattttggttgcagaagctacttagtatcagagtaggctggggtactcataaatttggatttggaaaaagccaattccaagtcatcctaaatgtggaagaatctgtgattttgagaatgattctggaatcagttatccagggtccagccaagtctgatacaccgatcctcagaaggttgtattaataacaaaaagaaaccaggtttttgtattagatttgatggaagaggctgggggacagaaggtgatgtagcattttgttttctggggtgctgagattgtgggattaggagaaaataagaaaaaagatcgcaggggagaacgatggacagaggcctcctgttagtcaactatcatgggcatcagaatttctttattcactcaactaatgtttatggaggttctgctttgttccaaggacccattataggagctggagatagaaggatgaagttcctactctagtgtagtttagattccagtaagaggaaacagatatccacactaaaaacaaacaataaataaaacccaataaattagtcagtactatgaaaaaaatgcaatgaactgaagggaatagagtttgctgaaggctgctttcaatagcttgtacaagttgcactgtctgaggaggtgcccttcaagctagcacatcaatactaaaaagaaaagcatgccgagagctggcagaaagaaggcttcaggcagaaagaacaacagcaaaagtcctaagactggaaaaggtctgagttgttcaggaaacagaaaggagaccattgtggctggacccgaggtaagaagcaatgagggaaaggtgggaaaagagcaaggagggcccgaggtcatgggatggagttaggctgttaagtgctttgagagcctaacatcctaactcattgggaggttttcagcagggtaggaacatggttggcattgcctttgagagctcttcccagcttctgtgtggagaatggcttgaagactgaaagcagagggtttgtaggaggctgatcggaagtacaagcaagaggggagggtggatcatgccaaggtgacagcaagcaaggtggaagaggtgttggattcaggatggaatttggaggtatggccagcatggctttcagatggaggggaccagcgaaagtgctggaaaacctagtcctgctcaagatgattgttcctgccctacccttgttttagaccccttgttttgaactaaaacagaataatatctagtgctatttaaaaacattaggaattttaaccttaacttgtttaagcagaacaaaacaaatccctgcctggggagaaacttctgtttgctgcttttgcctcttaaccataaaaatttcatcctgtctcgtaagactattctgatggcttttgttgtttttgattactgtgcttttcgtaagtgctggaaaggtcacattcgcattactagtttatctcttttctgagtgttttgacactttggctgtgtttaccaaggccttcctgctgtcagacatttacatggggctttctacagttgatcagtttctccatataagtgctaatataatcgcaagcatttagtgggcactgactgtatgcaaggccttgttttaagaatttcatgttttaactcatttagtccttccagccaccctttataataaaaagtgtgtactcttattatcattttatagatgaggaaactgaggcaaaaaaagaggttaagtcatatgcccaagatcatacagctggtaagtagtaaagccaggttttgaactgaatccatctgtacagctctgggttcctagtaactatgttgtgccacttttctatgtaattgaagctgccaccttcagaagtagacttgtttctcctgcaaaaaccccaaggtaccactaggagacactaaaactgggccgggcttccgggagttggactggtggggagatggcataatctagaggctgaatgatccaacccccctccaggaaggcctcacatctaaaccacctgccatctgccaaggtgggaggataaaccaccccccaccccgccgccaacagggcactggctggtgaaagttgccaataccagaggagtcttgatgaaatgccctctcttttcctcaaactctttctgcctactattcatagtatctgtgttgtacccacccacctgccacttatcaatgactgaagaaaccaaagttattcaacaagccatgaagcaaattctaattgctccccacggccatctgaggctggcctttggaaacttaaaaaaaaaaaattaaaaaaagagagtcatattaatttatttgttaccacattatttgctttaaaattctggtggcttctttccagtgttttattagtagaagcgaaataagcctaggaaacacaatatttcattctgtcttctctgcttttcactgcatatctaccttcaaaaatgtcttctctcaagttacttggtttctcaataactagcgtgaaagtaacagaccttccttccttcctaatgatagtaacaacaagggatttacagaattgaagtttatataaggaaatgcattaagattttaacttaagtaagtgaactattcagcaatggctataaagacagtaattgtgatgatttgtcttctatattatatgtttaaactagttatatattttaattatataagatgcaatttttttgctccagtttccatagggtaattttcaacagagattaacatgcgttcattggaagtgttgaatttacctaatcaaatcatcaatttgtttattcaactttaattttcaaaaaaatgttattttaaaatattatatgatatgtgtcaggtatttcttacggttgacttccaaatttaaaactgcaaagaaaacagaaatccatacatatagttgcagtaaactatactcaattttggaagattgcagtggcaacatcagtgaattaaagtttgaaagctatttcaaatctttgcatattctccaaataactcagaatcctacaaaaagctaaatatttaaaaaaatttatcttcaaaccaataatgtaagtttcttctttattgggatgattttggttaaatatttagcagaaagtaagggtgaatatatatttgatataggtatgtcctaagctaaaatcaagtcatttaaagatcagagcaattaatggcagttatgtgatcacaggaatcagtctatctcctccctcagggtttgattcaatgagttttatttttctcttagcaacttttcttattttacttttcaaaggacatcattgaaaccataatagtgttcatatctgtgacttttaaatttttatttatttttatgcatggtttaaaattcatttagttcatttaaaattcaaagatataaaagagcattcataaaaatgtccccctctcctgtcctccagcctttacaaaaatataccatatatattaatatgggctaaatacccttttaaagttatctcacacgcaagatgctatgactgtgtgaagccggagcctacagactattgctgatcccccagtagtagtagcagtgactctttagtggccctggagcttcctttctaaactcaagtgtatatttaatgtggctatttagggatgaacagcagtattttcagagaaaagtatagaagaacagatgaaatcacacaagatgcacacatctgggtattggtgggcatgtactttcagcagtgagtttacaaataatctagacagagttaagtatcaggtttaagagtcctaggatctaagcctgcacgggttcagtcttctgcaggaacttgggaatgttggggttcacttaggcccccagtgttggcatgtacacccactttcaggaggctggaggtataagttcctctctgcatttgtctcaggtcatcacaggcctcagaagtttctcaacagaaaaggattgcatgggttggatgtccagaaggatacgtggagttaaacatcagtcagtggagctagaggcttgctaagacttgggaagaggatgagggaaggcaaaacctgtcacctaaaggggaattctagaatgtacttactacactcatgacattaccctaccaccttcatttatcaccttgtgtcaaacatagacttcttggtcaagaccactatgctgtaagctacctgagggcaggactatgacttattctcctttgtttaccctgccccagtgcctaacagtgtctttggaattggaatgttcaataagtgggttaaacttttgaaactgaatatttcaaataatcacagataacagatggttaaaaaccaagtccttctcagcctaactagtgccaaaccaaatcattgtccatgtctcctaaagaaatgaaagttttctaattacctatataggtctggactcaaaactataaggcagcacactgtctttggtgttgacctatgtcccaggttgtccatggtcatcacacactaatgaccacttgtatgtatttcatctagaggatcacacagagtggtatgctaggcccaaggaataagtttacctgcttatttcacttctccactgtcatcctactgtgtttcaggaagaatttcttttacctctgcttactctactaagatgccccacataagcccccaactccttttcttgtccccctcccactttgttgtctattttcttctgtcagaccccttcctcctccaaactgaaccttcctgagaatataccaaagaactcaataaaccattcagcccactatagttcaataaatgagcactttgcattttaatagtggttcaacctcaagtctctgttggtggaaatgtcactgtgatctaggtgagggaaacattttgagagcctgtgggaacctccaatagcaccttatagtagcttcttctggtgcctgtgtaatactacaatttccagaagccttgttgatatccagctaagtgaaaagaaagtcctcagttccagagttcttacttctatttcttttttttttcttttcccttttgtttttttttgagacagagtctttttctgtcacccaggctgcagtgcagtggcgcaatctcggctcactgcaacctctgcctcctgcgttcaagcgattctcttgcctcagcctcctgagtagctggaacagatgtgcgtcaccaagcccagctaatttttttttttttttttttttttttagtagagacaggatttcaccatgttgaccaagctggtctcgaactcctgcctatccacctgcctcagcctcccaaagtgctgcaattacaggcatgcgccaccgtgcccggcccttacttctatttctaaatagcaatggattccactcttccaaggacccagaacttgccctaggggtgagggtcttttgtacatcttgcaactgagaacttttgctagaatcagacagacaacatagatctcagctctaattttccaggagtgaagctgtggagcaagtgagttacctctctgtctcactttttcatctgtacaatgaggctactaaaacatacattccagggttgctgggagaaaaagacaagacaaggtatgtacaacacttggcaccaaggaagcacacaattcatgggagtaattactatcatcctcaccaagagttcatgatttactgggggacaccaacacatgtacagtcaacagggtaaaatgctaagggtgtggggcaagtgttgagtctgagctcagtagaaatttatgagcctcaaaggccctaaaacatccttgaccactcagttctatttcacacccttcttgtacttcaccaacaaaccagcaacatgcttctggttggcagcccttataaaagaatttaccttctatagtcaagtccaaagctcttaactgcttaccacatgacagccaataagacaagatattggggcaaggaagatgactttttttcagggagccagcaatcctagaagatggcagactgatgtactaaagaaccatcttaagttgatagattgttaggctccttttatgttaggggaagggggaataggtagggggttaaggtccacagttgactggtgaccacaggcatctgggcatcagcagggatctaggaggttgcaaaacttctttgttcatggtcaactattttccagattgaccttgtttctataaatttttaagatggcattgttatttgtgtgcatactttctaatctcctcaggggtctgtttcaaaagagagatggtcattagttctgaagttaaactataatctaaattctttccatcattagcttggcctatgtataggaatgagcaaaggcagttagcctgtgaggttagaagcaagatggagtcagctatgtgatatttctcccactgttacacatctctgaatacaagaggaatacatttcttctttttgctgtgtttgcttcaagcctgtaccactgagaaattgggtgatccagggaagttttacttctcttgaacctcaggctctatctttgtaacaatggagaaatcaatgcctgcattctaggcccttttgagggtggaggaagacaatggttgagaaacttctcatctatagttgatcctcaatgcgtttgccccttttcctgtggcactgctttgtatttggatggttcgagcagtgcgtcacacatggaggaaaggcaatggaatgatgacaaatagtttgttgatttggtgctttgtacattcacccacaaatggcacagtttcagggccactgtccttgccaaatactatctgaagagctaggttatgagcctttggaacccagatctgataagcatggaggaaaactcctcaagggagatgaagctaggagattagcagaatatactttctccatttgtcccacatttgatgccagcaggcaaaccagagccagctgggcagtgtacaattcccagaaataaggaaagggtagaagcacctgtttttcctctagcaaaaccaaggcaaatggaaaagctcagaaatatatcagcaccattagcaagaggcacaacggggaaggctggaaatgtgctgaggaaaatcacattgccggtcaacgcatagctacctgctggagaagagagtctgcagacacacctcagcctggacaaaggcctccaggaccgggagctgtgctctgcaggaactgggccccaggcactgaggactgaaaaccagcccaacaaagcatacctgtttccatttgtgagagatgaaatgatatgggttttgtgactcactaaaccacttggaaggccaaacaattacaaaagcaagatgcctggcttcttctagccacatggaggggccctcagacttgagtagctgtgtgccacttgtctggggtggctgcaccaaaaggaacagtgaggtttagatgcttgttattgttcattgttcagttttggttctgtctatttacttctaattcctcaaatattattgtgattagtggtatagaaaggaaacgttcatttgtgagcaaagtgtgtaataagaatttaataatgaaattcccagaaaaaaaaactcagatagctaaagaaacagcagtaacatgagctccaaatatcttgagttgtattgttaaggtgagaatccataatgtaaagggaataatgtaaagggaatgctttgaaatcaaaggcataatccaagtgtgataacctaaaaggttgtggatttcttttaaagtagaaattacatgtggctttgggaaatcatcagctgaagcataagctatgcttatggattctcgctgtgttgtcactaagaccgattatataaagacttggcaaatccatgtacaaatgtaaaacttcccacaatggtatttcatggggatctccttttacaaagtggtcgttgatcaggacatttttcactgatatattcctttggaagcaatgaattttagataggatatgattattgtacaatgtgataggtagctctgattattcaagcagctagggcattattcagtggcaaagcattaagctactctggaatctttcttctgtgtaagcaggcagctgctgttgagactttctctttgtgggtgaatttgcccaaccaatggcaagcattcattgggagtaggggaatgacgctgatcactgttaatgacagttgaaaatgaaatgctttaatgaatctcatacttggacttggctgctgagccagagccctgtacttgaagagcttaattatgatgcctcaaaatttagatcttgaccctgaactgctatgacttcctcccaccctcagttttgagagaaactttaaattcgctaggggattcaatgttttacatgcttggttatgcaaaatgggaacagtagtgtccaaacaatggaataggcttctatattattattttcatttaggcagtataactgacatgattaccaaagtcatgttatagtacatgtatacaaattaatttcataccgggggacttcactggggggaaaaaagggaagtccctatttgtgaaaactatgattttggtttctttctgagtaaagcactgctaatctctttggtgtacaggaaagtatggtattatgttctaaaaatcagaagccccagaccttaatttcaactaatctgatgacatcattttgtactcagagtttcatttcccaacaatttcatgtttcttagtaggtggggaacccagaattgaaaggcatcaaaaacagctaaatataaccaaaaacctgctaactcaccagctttctaaaattcaggaagtatctttaacttgattgctgaatctccaaagacatgatgatcagatgactggttaatgggtattttttcagactctacatgattatcagaaatggctgccctggccaattgtatacctacgaagaggtattatgtagaagaacttatattcatctacttaatgtggacctcaaatattaaggatgttcctaatgtgttctagaccggagtcagcaatacttttcataaagagccagatagtaaatatttctaggctttttgggccatatagcctctgtcacaattcctcaactctgctcttgtcacacaaaagcagccatagacaatgcataggtgaatgaatgtggctgtgtttcaataaaactagactctcttaatgccaagtatttgctggaataacacaaattaatttatcctcaaatctgtttaacctattaatatgtcagtcaatattacattaatattttatgaatctggtatcatattatacatgaatttatctgaacatttggttaattcatgaatatttactcaatattaatactacatcatgaatctgttatcaagtcatatacagatttcttaaaaaatttcccttatttagcatacttgtgaataacatcaataagcaagtatcttaagttaactatcaggttatatagcagatcctctcccccttttgtaactctttctgttacaagggattttacattattatggtattgggaagtaagtctatttatcctgtccctatctgtcttcgtattaaccatattctgttatagcttttatctttgcagacagaatagttcaaatcttcatgatttgtccttaaacaacccccacttcctcatcctcttgaacattttatgcctccatcactgtctcttcaggtcttgtgagtccttgaagtgcagtgactaggctggaacatggtgttccaggttggtcacatcacctcttcctaatgatgccccattgtaccttttgactatagcaaggaataaacaaagtcagaagtgtgaaagtgggggagaaattgagaaagtgcaggggatttaggggagagaaaaatggactacaggaaaagaaaacattgacttttgcaaagtgctctaaactggctacaaatgcattccgtaattctttaaaccttaattgtaaccgcagttaagctttccggtgtgttggaataagaacaaaactaaaatccttctttgtatagaaattatcctgcagtaacttagagccaatatctctagttaggatgagcgcagtggctcatgcctgtagtcccagcactttgggaggctgaggcaggtggattgcttgcacccaagtagtttgagaccagcctgggcaacatagcgaaatgctgtctctacaaaaaaattaaaaaattagacgagcatggtgtcacgcacctgttgtcctagctacttgggggcactgaggggagagaatcacttgaacctgtaaggtcaaggctgcagtgagtcataatcacgccactgcactccagcctggataacagagttagacctgtctcaaaaaaaaagaggaagagatctctggttagagtttgtctctgatggatactaaccatgcaagtagtttacacaaaccacattctttctgtagaatgagaaaatcttggatataatttagcataatgagctaaataactctagactgagcttcgctgcccagacaggactctacttgtgatctgggaagatctacccttgcactgaattctctcctcttctctcctgactctgtgagaaaagtttgcatgaatttactgagattagttatagaaggaactgtgtgtcattgaaagtcttgtacagaagttcacattaaaatatatcatagtcatctttgggaatgattctgcaaaattcataaaacaaagatctctgaaaccctaaggcacactgtgctggaggctaagggaataatagtgagctgagtggtttctgcctacacagagcttctaatatattgaggaaagagatctcaatcaaattcaattgcatttataagtatggtaaggacaacaaaggagagagacattattctgtaggagaataaccctgtcaaagtgatgactgatttaagatcaaaatgggaaggtaaaattttctcagtacctgcaaaggcactgaggtgggagggagcatgccaatgtagggaaatgaagaaacccagtgtgtatgagccaagctgaataaaacatgagaagaagctggagaatgagagagaccagtccccaagctctcaaggagcaagaggaagccttttcggcatttgaagtggagggatggcatgatctcgtgcgtagtttttaaaagaaccactcaggctactcttttgagaatattgtgggaggccagagtagatgcctatagacttatacagaggttaaggcagttgataagagtataaacaatgatggtagcttacctcacatgctttttagattataggctagaaggtggcccaagcccatataccatcatggcacagtgaatacgttttccttctggatcgtggaaatgaatattgtgccacacagcttgattgacactccccaatgacttttaatactgtgggatctctggcacatacttcagaagatgagaaaggagttttaattaacctctgtttaggaattccatagacataattttcattaacatctacttggtatttcatctccatgaattctttccagtgataaagctagttggtttatcctccaggactgctcagttctgaacagtgggtcttaagtactctttggatttctttgaaggcttttttttatttttgttgactacctctctactcattttgccccagaaaaaatgtagtcatttctttgataagtgaaatctaagaaaggcttatttcatttggtacattaaagagatggaagaaagtaactttacataagaatataaatgccagctgtccagcatattacagaatagatttctaaatttgctgaaaggttaggaaaatggattcttatataggcttaaaatttttataatttttttggcattctagaatgaaataaagaaaatcggtatcatcttgatctcatcacccagaagaaaaaaaaaacactgatacatggtgaaatattttcctctctcatttttaaaaagaatcaggaatagattgtatacatatttttcaaattctttctacttagtgttatatgatagtcaataatatatgtgtatgtaagtagcaataaatcattcctgaaaacttgttttttaagcttgtataacattccgtcatatggatgtactgattttgctaatttgttaagtttaaaataatattcattttcatttctttgactactaggtataattaattttttcatacactcactacccttcatacttcttttattgatttcctttttatgttaattattaagatttctatttgactctcaacattttcttaatttttttatcattaatagatgtaaaaaaattcttaatttttaaaaaataaacccttttcatcttaaagatagcaatctattttccataatacttgttataaatatttccccagtttgatgttggtcttttaattttgtttaaagtatttttgacaaataaataagtttttgtggcttgaagtttgttcatttttttcatttgtgattacagtttagttgttgattcaacacatccttattgagtgttttgtgttcagcactaagcgagacacaagaggtaagacagaaaaacaaggtgcaggtggttttgccacttagagattacaatttaatgaggggatagacaaacaaaaccaggtcattataaaatagtatactacaagctatgcaagaggaaatacaggtgggaagaagtacctgatctggacctgggggataagggaaggcttctggaaggaaacaaccttctagctgagaatgaaggaaaatggcaacatgaatttagagagaggaaacagtatgtgtgaaagtgttgttcagtgtcctaaatgttaaaggtcctctttccccagaacatggagtgtgtgtgtgtgtgtgtgtgtgtgtgcgcgcgtgggtgtgtgaaggagcagggcagggtggtggtcaagtgtgagcaggaggccactggggaggctgcggcagtccgagagaaagacaatgatgttgggcagaggatgtgttgaataactcatcccttttcactggacaagcaatgcttcagtgtatattaagttcttattcatagcataccgtctattccagaataatctaattagttttattgctatatcaattcttgggccaacaccacactggttttgagtttaatgaaacgtctaaactggtaatgcatgcatcctctcatcacttttcattttcaaaattgatttacctattcttgccaatgcgtcctcccaagtaaactctaaaataatttcaaaagtcacaaaagcatacgtgtgtgtatatgcatgtgtgtaaatacatgtatatatgtgtatgtgtgtttcttccaaccatttttcagtttttggagaataagatgtttttattcaagttgctgtcagtaaatattttatattacatgacttctctatacacacacacacacacacacacacacacaatctcccattggtaatttgattgggaatgtgttaaatcaggagaacagacattctttttaatattgagtcagcccatcaagaagcattgaatgttttcccacttactcaattcttttatacttctttttaagcctttatagtcttactcatataggtcctgcatatttattgacggggtattcttttttcttttataattttagcttttaattatgaatggatttttcttccattatctcctctctggtattactggactacaggataaatattaatgatgtatatttactttttatctgattatttaactgattataattaattataagtgttcatagttaattataaaagtttataatcatggtgtctttaaataatgataattgttctccttccaaaaattgcatctaatttttatttggtgtcttacagcattgatcgtaacttctaatactaaataacaatgataatagtgagcgtcctgtcttaatatcaatttcaagaagaacacctcttacataacatttttaaaagtgtgttatgtggaagctaataaaataaacttgggaaatgcgacaaatgaaaattctctctcccaggcattcttaattcatattaacatattaagatgagatctgcaacaaagagatgagttcaactgagtttaacccagtatttctaaaatgtatttgactatggaagtatttttccctcatttagaattttacatcagttatgacagtcaaaattatattaatttgatcttctttctttttttagaaaaataattttcatactttcttgtcttttctgtttgatctctcttttgccatatggactatgatttgggtttacttttaatttttttcaataattgagaagctcgtcacccttctttttatttctacaagtggttacacttaaagtttccaagacatttctatccatatcttatacttagcaaagtcaaagacatgaccatacagttttctaatcaacttcaaaatgaaatgttatctttgaataaccccatcaaaagaaatttaatccatttttacttccttccaacctttcctcagtattggtaagaataatttaacattttttattcatgttactgtcagtaaatattttatattatatgacttctcttttgtgaattatgtgatctgttcagcaacataatcctttacaatacattcctgagcagttctatggttatctgatttctgtgtccataactattgtctttttataccataaatttctcatttttttactttttaattttaatatcttaagattcgccaccttttatcccatttatccttttagggtgtataatgtaggtcatctacattttgagaagtgcctgattctgtttactatagtgtcagttttaccccttactgccttcagtggacaaattagtactattatttcatttctggctcctctacaaccccttttaatctaacccagcactcttttccttccttacttttatctcataatggctacctgtccttttccacagtattttctatttcagttgaagatgataaacagttttctgacattgacattaagatgatgtttcagttttcttgttagacaattttgttcactgtctaagctacttatttttcatgattactcgtctaggaataaaaatcaatctacttagacccaatatttttgaacactgagcatatgtaatgtgttcttaaacctgttcaatatgtactgggctctaaatgtcctggcctacagctggagggcagaatgacatgtcctagttcaatatcagcctctaacaggaatgctactgatgtagttttctgcactgagataggatcttcttttcttccattgcctattctcctggaggcaaaatagagaacataaaaagtcatcatctttggtatgttcttctttaggggctttttctttctcccagcccaacccccatagtccttacttgctagatgtgtgttccaggattcagttcaccactgcccagtcttctaacatccaatttcattgttttctgagagttgagaattttcatacagatatagaagggatgctgtgcttgtttgaaatggttctatttggcagaggatagccgaacagtttttaggcaaagaatgaactgtctacttactttctttgaagaagccaacaatttggttttgttgccaacagcaaataatatattggctaataattgtggtttacagtgacatgggtaatgttagtcataacatgtcttccaagtttctggctatggactaactgtaggtcttggagtttggtattatctagaattttccttctccctcctcccccacctcttatcttttagcatagttgaagattggaacttcttcccagaaatctagcatcttcataagtcctttccggttttaagatttttatcttatattttatatatatattacatatatttcctgtgaatcttggctgaatttctcatttaataaagtccaagttagtatgaataaataacatgtttcccgattttacacacatacagaaattcaaacacataatgaactctctggcagcctttagcatttgtaagtgctctctcaccaggaaaatcctttaatagataaccaagtgtcctggggaagaagggtgtcaggaaacttattatatttgtgtcactttcttcaaagggtgattaagtatatgtctccaaagatgtgatgttatcatctttgagtatcacttgaattcaagtcaatatttattgagaccccatgttgtatcaggtgccttactagaaagtcgacatatagagatgcataagacatgatctttttcagtgggtaatttaaggtctttcttctactgctagcattgtcatgtgtaaggctggtgggttgagtctttggaatttgtgaagattcttccaggttgtttaaaaaatcttttgattctcacaaatgtattttttctatttcttagaattatgttctttatggctaccaggaaatcctttgaaactggaattagattgcattattccactggggtaataggattggtaaggtaggagtgtctttgaagaataatgctaaataacccagacactaaggctgaatcttcagcacagctcttaaggcatcctgtaagtaccctctgctgcttattagaaatcccaaagccctgctcccttaggaaagcggcccatccccatcctcatcataagatgcaaggcatagctaaacatctcaacttctcacttgagtattatatactctcaggccaggatactttccaactcaagagtaagataacattacattctgatcttcttgtgtgtgtttttatgttttttttttcattttatttattatttttttttttgagacagaaattttactcttgtcacccaggctggaatacaacggcgcaacattctgatcttcttttgagagaaaagtttcacacaattagcctttgaaatacacattcctttaagtaccatgaaaacattgtcccatacaacaatatttctaagaaacacacatgtccctcccacaatgattttttcttgttaccaccaataaaaattagagctgtgttgtttttgttgttgggtttgtttttgtttttgttttttggtgactactgtgaccctcaaaaaatcaatccgactttctcgatcttgatttgcaacaccaaggttaccaaacaaagagaatggttcaatgagggaaagctcaactacctgccctaaatatttagtatagcaatgctgagcttttggtaatggctcaaaattctcatgctttcccactaaatgaaaaggggagctttgctactagtaaaccatattcaagaaataattcttattaatactttgcttctttcctatgaattattgctttgtaatggatgtttgacaagttactagcaaagcagtcttcgatgagcacagagacccatcagatctgtattaacacctccaaccactggagtttcattaagtaggtttctctacccctctccttcaggccacagataggaagaatgacattgggtccaaagttctggcacaaagaatgatgtctgccttcctgtgatgatttcaaattcagggtaataattccaactatctttccctggccatgatagaaagctcaagaaatcttggttccttgtctcttttcttccatccagttggtctttctaattacacactcaacacaatgttctgctgagcaagacatctgctgtagccactatcacccttggcataaccagatatttaaaggtacctaaaggagtttagctatattttgccaagatcctaagttctatggcataagaatccatccacttctctattgcctatagaaaaggacagctcagtctttctgaaagaattgttctcaaacaagaaagcatttgaggtaacatgtcaacaaggtggactggtaattggtgttcctttcagagccagttggaggaaatggccagctcagacattctcttctccccagtgtcctatgggaacaagatttacccagacacagctgactatgagaagtcttcagggatttacaacctgtctaagaacaaggccaatggggggctcactttgcaacacgtccctatttgattgtcagaggacagatactctattaacaaaggaatttgcactggtattttcagggacacatcaagtaattgccacttgaacgtttttccaggctttcaaaggaatgtaagaatggcctaaggctaaattacattcatgtctttagtgagtcattatattactggcaataaagtatattattactttactttcagatgccctcacatatttttttaaagtagaaaggagacatattatggtcaccattcttaagagacttaactaaaagacactaatttaatcttttagttacttaaaaatagctgttgctcacccactatgtgccaggctctataccaggcaccaatatgaaaaggtgagtattctctggtctccctaagcacagtctagtggaggagacagacaaaatgcagccatggccagaagggggagcagttaatgaacaagtaggcagagagtagggaggggattctgagagacagtacggacggactgagggtaagttgtacatccctgatattttgggcaattgcaaatagtttgatgaccaaatcacaaggagaagaagtgacagcaagcatggctgaaaatgtaggttggtgtcaaattgtaaaaagccttgaatactgtgctgaacggtttgatccgtgaatcaggtagaggacttgactcaggtctcttgactcaaaggtcatgttttttctctgctagattgcacttatccttccaaatgctagtggacaccacactgaatttgatcaaagatctctcaatggaaatatgtaaatttcctgtaagaagcaattggtaggttctcttattatcatctccatctcacagataaggaaactgaagtataaagaacttgagtaacttgtccaaggtcacacagctagttaggtgatcccagacaatttggctccagagtcactagtcctaactacaacaatttagcctctctttatctagaggtctttatgcatttgtctgcattctacttacgttggtattggtgagtaaagattcccttccagaataggtttgataaattgccaagtctgaaactgaaaaattaatatccatgataacagaggttttggggtcaaggagtgaaaggaattcatcccatcctgtctctaaatacttttttctttaccaatttatgggaatttgagaccagatatctggaaccaagcagcctcaccctattaagggaaagaaaaagaacagaagaaaagaggagaggagaagagaagagaagagaactaaaagtatctgcaaaaatattaaaggatttgaccgagatctctgagatgctccaaagattgcaattgtgcttactatccaagttaatggctgtaaatctaagagaattatgatgtgcctggtaaatattggttgttttgttttaagtcttcatggagaaaatggaaaagacattggcatgtaggatgaagtcacagcaggacagacaggtcctgcaagtgtttctttagatgcattgatattcataacatccaaacaggccttaaggctgtcttcttactttacacttaccaaaggggtaaaatatcattttccttggacacacaaataataaacgtactctcacaacatcacttgaatgttgtggttttgcaaatatactatgttttaaaagctatagccctcaaatcccttactagacatcaatatttgttggaatttcaacatcaaagatttattgtgaagggggagggggaggagttactccaaaggctagaaccagtgcatataccataataacaactctgcatgcattattgcttctaatcttcataattttgagtactatctttattgtcaccatttaatgaagatgttaaggttctgggggcttaagtgacttgcccaaagttacacagcttggtagaaacagaatttaccacagaacttgtgtgttaagccaaataattttctagttccatacaactaaaaattggaaggaaaaagtagagccttatgaatagagtcctgagcaagaaggatgaacaatctgcagatgaagtactctgtaaaggaaagatctgggtttgaattctaaccctgcctccgttcatctgtgtgatcttcgcaaagtctgttaactctttaaactgttggatatttataaaatgggactggtgctatttggcctgatatcttacaggggaagattcagtcaggccaggcgtatgtagggtctctctgacctggaaagccctatataaagacatggtaccattcttagtgttaggactgaaactacatccctagtgtcctgacacctcataccaatacccagaaaccctaggctcttccttcaatcccatactccttcctcagctgccaggacagcttggttaagaaaagccttgttcttggggagtatatccatgaaagtatctctatttcgttgcagtttcacattaagtaaaattagagtgcccttcacgaagaatatataattgaaagccctcccactgactgctggacaaagcacttgtcagtcaacaaaccaggtagattgagtctgccctcagagtttttgtattctgagagtgactagcaactttctctcatcctagagcaacagggctttcagaggacaggttctggggcagcgtgtagccacgatagaattggtttgcttttgtgtccaaagtcatgattatcaggagagctgccatttatcaaccacctctttgatacttggtgtataggacaggcgtgttaactatattatttctaaaccacaagataagtctgtgaagtatttttatccctggtttacaaaggaagaaatgaggctctgcgagacatgccagaaagaacatgctctacacaaccaactggttacaatgtgcggctttgtccagcactacctcttctttcttggcaatcatcagagccactcaaggcttggaggactgtgctggcaaaaaagaaatcttgtattttctaaaactcacacccacactttggaggggacaagattgagatcaaccccatttcctactcttttctttatgacagtttatcagagcattttttccttatattcactcagtcctgagtttctatttagttgtgataatagatacatttttgaatttttaataccttcgggtgcaaatttggaatctatggaggataagggagtaacaaaatgttatggaaattgaaatatataaattattaattttccctctcctctacagatttacaatcactttatttggggatatcaagtaggttatgtggttactgtagtactcatttaataatcagattttatttagagaactataaaaggtacaacttaagggggaaatatattttagatgatgtttttttttcaatttccaatttttgaagaatgacgtgtttttaaaaacttttaaagaatttctcccacatttcactccctttaaggtaaattgatagctgtgaaaatggcaccttggaaacatttctgtcataatcataggagagagtgagaattattaatattctcagccatgtagcatcataaagtagatcacagctgtttctttcagaaaatgtcatttgattttcgatcagatgtatggtccatctcacaatctaaccgcttccacatctggaatatcttaactgaaaatgtccacagcattacacggcctggctcagggggagaaaagaactagggcctgcatcgaattctgtctctcactcagctgatctgcattcctcctatagcatttccttataattaagaagagctcatagatttgggaactgcatgagcctctgtaaccttctggtgagggtgagaagctcagaactgcatttctatgcatttttccctagtctttcctgcttcggaggagaagccctgcaagagcttcctgccaagggaccctgctttctcagcagccggatccggagagccagaaatccatcttcagctcctttgaacttggctgttgttaatcatgctgtggttgtcctttaagagcaaaggcttcacggagagcagatcagctggctgtagggagggtttcagcttctcattgtaggcagatcatctgctaacagcttactgagagaaagttgaggacatgtggctgaaacactgtcagagctgctgtgaacacagtccaagtgagcaattttatgacccaaaccaagcagacactaagtgctttctagtggtggaaaaggagcagagagaaaaagaacaaagaccaagtggtggaaacaaaaaaaatatatatttctttcagcagctaacatatttttctgtttagaagattggtatctcctacttaaccacaaactacaacacataagatcaaataagattaaatgtccggtttgctaaatagcagagcgaagaaactaaggtcaagatttcagactcttacatctgaggaaagagagaggcaaagagaagatactggaaatgccaatatccagtcaatgaaataaacagaggctactgtaggcatccccagaagcttgccttttgtccagtgccatgggaaccacagaaggcactcagctttgcagcttcactcagaattggggcaatgctccacagagtcaagggcatgttattataaagtgctccatttgtttactttggcaagtggaagatgactttgctaagcgatactctgctggggctcagggccagcactgctggagtaggaaaagggagacttcctggggcaagccttctcaatcttcctgccagcagcattgcagtcggagcggcactgaggtgtcaacaaaaggatgatgaactgtgtcagcagtgttagcaaatggctgaagtagaacggagctgcccaggatgctgccctgtcgctggggaatctgagggaggctgaaagatattgtaaaagagattgaagggctggactggctggaggaatggtgccatcggcatccatgccacaatactccaggactgccctgcctttgtcaggacagccatcagaggcggttttccctctaaccaggatgggcatcactccttgggcttgccagtcttacctctcctcatgcaattgcatgtccaaggcatgccctcaggggatggtgctgatccagggtggcaaacccaagtggggagaaaatgctgaatctcatcctctcagagatctgctgcagtcagcgactatactgaggtgcatgatctgagcagcagtcgctggttggggaggcttctttgtggagtgggtctcagccacagcctgagggtcctctcttggggatgctaccagttaattgggtcatcttcagcctccacccaaacttaggcctgtaggtccatcaattactatatcagcctcaaggactgaacaggtgggaggaaggactagtgtgagtgatggaagcagctgagctgaggagtgctggcacctgtgcaaatccagcaagaatgacatctggctgagcttcagtcattcacctaagcaccaatcgggggtcactcccagatctgagcaatgagggaaacttcccagggggaaccccgcacttgggtagacctgggggagcagccagaaggaaaggggttgaacctgtagttgattaagattcagagaaagaaaaaacaaaaacagaaaacgatcatagtttcagacactcccaatgagcctgtgacctccccgaaatcctatagccaaacacacgggtggatctggcctcactttcccattctcccacttgtgacttttgattccacatcatagctaaggtcctcggcaaattggattaaactttggatttaaaaataaaatagaattaaaataaaataaaaaagttggggacaggagaaagtggtttccaagaacctacacctctctaccctgaaatgactgaatattgtgttcccctcaaaattcatatgttgaaatcctaacccccaatataatggagcctttgggaggcttcatgaatgagattagtgcgcttacaaaagggtcccagagagctctctcacctttttccaccatgtgaggttacaacaggaagtcagcagtgtgcagtccagaaaagagccctaaccagaacctgaccatgctggcaacctgatctcagacttccagcctccagaactgtgagaaattaagttatgtggtttataagccactccgtctaaagcactttattatagcagcctgaactgattaagacactcctgagaacgattccttcggggaaggtcttgattagccttcacctagcccagtttgcaaacacactggagtgtcctgcccatggcaatgttcatgtagcagcctgggagacagaggagggggattcctgcaggagcaatcttcccaaggaggcagttcctactagctaactttcttgtcctgcttgtgctcattgaaggtccaaacctgtcccctgccctatgtttgttttcctcctaatcccctggctgatggagtcaggctttggagaattcctttaagagtcttagttggccttatggatcccaaaacacacccttctctattgatgccagattctgagcaggctgacagtgcatgcatgagaacctttcataaaataggactattttttattccctttgctttttctttgtgttatttcccctcttcactccctgtccttttaccttaccatatacatttgtcacctccttgcctggaaagcctagtgtcacctccctgccttttcacagcctataggattgagtccaaacttgccagcttggcctttcatggagtgcaggtttagtacaggactgctaaacacagtttcagaatgaaccattctcctggcctttatcattgccaatatttctctttattttattttattttattttatttagggagagccgatatttcataagagttgatggactgctttgcctggaaacttgagaattcatatttttattcaaaatcgttttcatttttttgcttagagcctgttaaagactgaggccctctctctgtcccttctactcccagccaaacccaatagacacatgtgagcaagttgtcacctgacccgaagctccagcccctggaaccaactgaaacaaaatgtatccttgcattttccagcaaggaattgccttgcctacaaaaatactctgtactttaatatgcagatcaattattaacagtaggctgtacctttcaccaggttgtaaaaggatgactgcgtagagccacagcattctccttgtcagtgtaggaaatgcagaggaggatgttacctccggcacttgcctctaagacacctaataaagatgaggaaggctccagcctgaagcgtgggtgaggtgtccagctgcccaaaggcgacaggtgagatactcaggtccccttcctctttttgctgtcagttctgattctctcctttcaatctttctcatctgtgattgggaatggcaggggtggggtgtgtttggggcatcagtggtggtaaaaatggtcttatgggcagggccatgttgaataagagatgagcatggagacagcgtattaacttaaaaggccaacaccgaggctcatttgagaccgtaggaattccagggagacagtgttgttcaggcatgggatcgaagatcaggagggcggctcaataacacgctggcccggtcacatgacagaccagtccttggagtgaactgggagacaaggaggctgctttggcatggagctgagaacatctctagatcgcactggaaggcagagagaggccagacagggaactctgaagagctgccacagcctgtgccagggtgacatcagggtgagttgagatgatttttttaacaaacttcattttttgcagcagtcttaggcttacagaaaaattgaacagaaagtacagacagttcccacatacccgttttcccccacagagtttcttctattaataacatcttatgttcgtgtggtatgtttatcatgatgaaccgatgttgatatatcattattaactaacaagtccagagtttacattagggtttactttttgggtcgtatggttctatgagttttaacaaatgtataatgacctgtatctatcattacagtatcatacagaatagtttcacttccctaaaaatcaccctcccttccttcctgcaaatctctgacaactgctgatctttttactgtctctatacttgtgtcttttctgaaatgtcatgtagtcagaatcatgcagaatgtagtcttttctgactgcttctttcacttagcaatatgcttttaagcttcctccatgtttttccagggcttggtagcttctctccgttttagcactgagtgatactccattgtatggatgtactgtagtctgtttatccatttgggcagactttccagcaagatagaaggcagaagcaatggaaagggtggatgaagggaaaactgcaaggaacacaggacaagatagaagcaagagcaggaaggttttggagaagtggaaaaacaagctagagagataggcacagaggcctaacctggggtaaggcagggccttgtaaccaacgctcagtgagagaggcagcccctcactgacctgcaccaggcctttcctgattttatagacagagtgtcatgaggtcatgagggcaggaaccatgtcagcttcatcctgagagcccagcactttgtaggcatctaataaatatttattacaccaatgaaaccttcaaagtctcttctaaaaaagcaagttctcccagacaccagaagacaaatggcctagcagcccctgagccagtcatctcgggcagttgtgagctggttgcttatttgaaccctccatgccacggggcagcatcaagcttgcctgacacacacctcctgagccaggaattcaccactttgccaccatctctgcctggcttgggagatgctccgtggacagaaccagagccgtgctgcagggaagcagaaaaaccaaaggagatgcatgccaatctaacatgccagtttaaaaaaaggcattcttgcctcagagtaagaatccagctctccatgcactcgtctttcaacccaatcacaaggcatcagaattagcccatatgacctctatgggacaagaagagcaagcagggtgatttgggtgctaagaaatagctgtgagaggatgatgcggcagctgtgccctccagatgttcggagagaacatctgtgcaacaatagcagtagctcccatgcactgatgtgagaacccagcctaaggggtacagcaatctgggtggtagggggtagctctcagagggtctgacaattcacctaaagattgcaggaccaataggaacctgccagtcagaatttcctagctcagtggtgccctccaagcaagagagcttatcagccagacctgtgtcttggtgcaacatcactgcttaaaatcaagtcctcccaaggcatggtgtccattttactttctctggatgaaatgaagacagagaatgaacccagtaagatgatagagtgctttgctttggatctgttcatatcttacccgtgtttgtgctcacatgagttacacagtcagtacaagggtagagagctcttgagaatttcttacctaagggaaagaacttgggggctgctttgctcaaaggctatttttcagtgtggggcttatctagagacatatattttgctccttgtccccactgctgttgcataactacgggagttgagggtcactatacacagacacagatggtagagatgggggcagtggttgggcaaggaatagctgccttgccacttcgaagtctcctaaatggcatctctgaagaagaaggatatgtccacagggagaagggccccatggtgactctgttgctcctaatgtgccaggctcagactcttcaaaccacaagaagtggcccagcgagttccatgtaactgcaaatgcaagcaggaaaaaaccacactcagatctcagcacagcatcagtcttggggacagctggcctttcctaatgcagcagcatctggctgcttctgctgtacctggatgtcttcagggcagttcttccacacagaggaccccaaataaaagcagaattcctaccattaagctttccgtatccaaaactttctatgtgaaagatacagcatctgtgtctcacaagaatctgttttcttggggcatctgctatttggcagctaaccaaaacagaattcccatcttattttcttgttcatttgtgctacatggaagggactggtcctgaatattcagggcaacatccagcatttggtagtagtggagagaaagagaagagaaagctctggactgtgttcctctgtctgggaatgtgactctcacacctcccaaatcctcccattcacactttttctccctgactttccagaaccctttttaggcttagctccttttatcttaccctacacgctttctttctacccacactggtgggtacttttcagccatagacattggagcacatttaaatatgctggagtccttagagaattaagaggtgggggagagaggagggcacagagctgaggatggcactagctcattcacaaggagccctgaatttccagggacattaaagaacagatgctcatgacagagcatagagctctgccctaattgtttgtaatgttgaactatgtgtcattcgttcactcatatattctctcaacattggaattgagcaccaattatgtaacagagtaggtcttggcaatacaaagatgaatgaaacataccccttgtccccaagaagtatgtggacacgacaggcacatggaccaatgatggtcatgtcaagcgtgatgaagtccatggtcctgagggacacttggaccacggcctgcatgagagggcctggaacccaactgggcggatctagaaagaattcctctggacttgattcctgaacttgaaggtagagatggaaggagaagagttctgggtagcatgttcctggcagaagaagcccactgcaagagcaaaggcactgaggaagcctggtggtcactggaaaactgggattcaagtagctgaaatcgtaagggtgcagcctagggagaagtgagacccgtggtggggggcagagccaaatctctgtatccaaacctttctatatgaaagatacagtgtctgtgtctcacaagaatctgttttcttcgggtgtctgttatttgagtgctaaccagaacagaatttctaaagatggtctttgaggccaggtaacaaggctgaggctaagaagaactatggaaggtctgttggcaggagagatgtatgattagatctgcattagcagaaggaaagttctggctgaaatctgcagagcagtttggaggggacaagacagatgacatggagaacacttaggacgctgttataataaaataggctagaaatgatgttcctcagaagtccctttctccctgcacacctggccacctcagacttcctgttcaaggggaaggcaggctggggagagaggtttcttgaaaataacacatctgggccgggcgcggtggctcacgcctgtaatcccagcactttgggaggccgaggcgggcggatcacgaggtcaggagatcgagaccatcccggctaaaacggtgaaaccccgtctctactaaaaatacaaaaaattagccgggcgtagtggcgggcgcctgtagtcccagctacttgggaggctgaggcaggagaatggcgtgaacccgggaggcggagcttgcagtgagccgagattgcgccactgcactccagcctgggcgacagagcgagactccgtctcaaaaaaaaaaaaaaaaaaaaaaaaaaaaaaaaaaaaaaagaaaataacacatctgttaattggatcatttctgtgtggtcaatgtctgtaggggctttgttttggtcatcatagtataaaatccccattatgtaatatttcctcctgataaaagctcactgtgtgtctataccctaccagcttccttatagtatttgctcattaccaggttcaaggacctgtctgtgtggctcttccccagagcctctgttggaaagaagatttgtctttggttataagtagatacacagtggtcaagatgctctagcacagtgcagcagaataagatgggctcagtagggaaagatcattcacccctaaagtgtacacttattcttttctgattatgataggattatgttgaaattaaaaattgtttcaacgaaaaagcaactgattgcttaggccaaagcagaactttttttttttttcctgaggcaaagtctcagtctgtcacccatgctggagtgcagtggcacaatctcacaatctcggctcactgcaacctccatctccccagttctagcgattctcctgcctcagacttccgagtagctaggattacaggcacctgccactatgcccagctaatttttgtatttttagtagagacagggttttgccacgttggccaggctggtcttgaactcctgacctcaagcgatccactcgcatcagccttccgaagtgctgggattacaggtgtgagccaccatgcccagccagaattatttttagtactgtagttaagagggcacattctggagcaaactgcctgctaagtgttcgctgtggggcattggggaagaacttaatctctttgtgccttggtttccacatgtaaaatgggataattatattgtccccctgtactggtttgctggggctgccataacaaagtaccacaactgggtggcttaaacaacagaaatgtgttgtctcatagtgctggaagccgactcacctcagaagcatggactcccttacctccaagtccaaggcaatggggctctctccctcttgcctcttgaattcctgcatctcatttcactgggtaaacagggaggctcctgtgctccagcaggaaaaccctggactgggaagcaggatgtctactctgatcctgctgccccaaagctgtgcggctttagacaagtggtttgacctttctgggctcagtttccttgattttcactattatttgaagggcttggggtcatggaaatcatgaactcttcacactgagaggaatcttcataatccattttgtagataacgaacctaaggctgaagaggtcaggggcttgcacccagtcatagagctaaatgaggtgcaaagaacctagaactccggcgtcttgactcccacctgggacacattttatcagtaatagtgaactctcatctgttgatagtgttagaattctcacatttactccccataacaactttctttttttttttttaaacggagtttctctctgtcacccaggctggagtgcagtggcacgatctcagctcactacaacctctgcctcccgggttcaagctattcttcagcctcagcctccctagtagctgggaatacaggcatgcaccatggcgcctggttaatttttgtatttttagtaaggatggggttttgccatgttggccagactggtctcaaactcctgacctcaagtggtccacctgcctcaacctcccaaagtgctgggatcacaggtgtaagccaccatgcctgaccagcacccttctgaagtaggtgctttcagaaatctgaaagcatagtgtcggttagcagggttggatctcttctggtactgtgaggaagaatctgtgccatggctgtctgctagcttctggtggtgtgctggtcatccttagtgttacttggcttgcagaagcaccatcgatctctgctttcatcgtcgtgtggtgctgcccctgcatgcatgtatctgtgtccaaatttcccctttttataagagcaccaatcatattgaaatagggctcaccctcataatctcatctcaactaattatatctgcaataaccctacttccaaaaaacaccacgttctgaggtcctgggtgttgggatttcaacgtatgaatttggggtgggagggcacaattcaacccaaacattacctaataaagttttcaacagtaagtaaatgagttaactcctggaaagcatttaaaacagtgtctgacattcagaaagctctcagtaaacgttacattatgctgggtataaataaaaagctcccaggacagtggacggcattgagattccaccggtttgtattagtgtggcctcgccagtaatttacatcttctatcttttttggttggtcagggcttaagccataccaggtaaatattttgaataatactcctagctaaaaggtgcaaggagtagatactgtgggttctgatttttctttcccgttctccaagctgtgtacacagaaccatgcaagtcgccccaaccagggaaaaacaactgccatttcttttaaaggggaaccaatgaaggtcttgtcctgatgagctcacaaaagcaaacttctccatgtctgtcgctcactcagtgggctgaagcagagccttcacgctaagctttggagacaaagcttcttagagaatgtgcaacgtgggctgatcccaggctgcccaaggagcagctgacgagtgtaaaagtgtttgctcaccgattagaatcagtcctttaaaaaataaataaggtatgttgatcttttatgtgatgattaaacaaatcagatggcccaaaatgaattccaggtaaagaggaataaaatatcagaaggcaagctgctgaaattagcaagagctgaactcgaaaagcccgactttccaggcacggctagtttcttcctagcaagttcctgacggagctgggtggctgccccaggtgactgcagtagcaggagattaaggagacagcacctgcctgacaaaaaaggttgctgacacaataggccaaagttaaattgagctgccaagggaaaatgattggggatatgcagttaacagttgagggagataccagaagaatttgtgtccacagagagattttgatggggctgactttgccgctgaccgactcacctcagaagcatggactcccttacctccaagtccaaggcaatggggctctctccctcttgcctcttgaattcctgcatctcatttcactgggtaaacagggaggctcctgtgctccagcaggaaaaccctggactgggaagcaggatgtctactctgatcctgctgccccaaagctatgcggcttcagacaagtggtttgacctttctgggctcagtttccttgattttcactattatttgaagggcttggggtcatggaaatcatgaactcttcacactgagaggaatcttcataatccattttgtagataaggaacctaaggctgaagaggtcaggggcttgcacccagccatagagctaaatgaggggcaaagaacctagaactctggcgtcttgactcccacctgggacacattttatcagtaatagtgagctctcatctgttgatagtgttagaattctcacatttactccccataacaaccttcttcttcttttttttttttttaaacggagtttctctctgtcacccaggctggagtgcagtggcgtgatctcggctcaccgcaacctctgcctccagggttcaagctattcttcagcctcagcctccctagtagctgggaatacaggcatgcaccatgacgcctggttaatttttgtatttttagtaaagatggggtttcaccatgttggccagactggtctcaaactcctgacctcaagtggtccacgtgcctcaacctcccaaagtgctgggatcacaggtgtaagccaccatgcctgaccagcacccttctgaagtaggcactcttatacccattttactgatcaggagaccggcttgcccaggatcctgcagctactgaatagaggggccagaactttgctggtttggtgcgcttcctggtacacaccagctgcctccaatctccctttgataatcctagccacatgccaccgcgggtgctctagtgtaggctggcaccaaccccacccagcaagagccaggatctgcttcttgagggcaggcaggtttatcacacagcggggtgcagaagagtagtattcatcttcctagtgtaaccacttataactacttttcagtgaatcaaatagatttttaagcaagaacattgtaaaaatctgcttaatcaagggtggagcaaaatgagttagccagggccaccctagctcagatggggtggtagctgcctctgctccacaatgaggtatttacacttgctccccaccctctcctttgccccattatcttttagttaaagggccaggtgcaccagaacacaggtgccttgagtagcaccagcacctctcagggtcatagggaagagctgtttcctctgggtaaactgaggcctcaataaggcataaatgccttctctgggtgaagaagatatgccctctaagatctctccagggtgaatctagaataagttgtagtctagatggcttggcagcactagccagtgtgacagtaagtcttgatgaacatcagtcagcgtcatgctgagggacaacctcgaggagagggaatgtgtacttgttacaacagcacacccaatagaaatagcatgtaagctacaaatgtaactttatattttctagcaaaaaaaaaattttttaaagaaaccagtgcaattcattttaatagatcttatttgtttcaatatatcccaaatattgtcctttcaatgtgtgataatatagttattagtgagatattttccattccctttttcatacaaagtctttgatactcagtgtgtatttcactctgacagtgcacctcaatgtggtgcaataggcgagggtctatgtggtacatcccgtgcccagtgtgcacttaaaggctgtagatccatatatggcgactgtctcctagatagatgagcccagcaaggctcagtgggtgttttgaggtccatggtctctcaggtcccgttccaccccgacattcgacgaatcagagaacactaatatggttgggaacacttttatcttgctccccatagtctgaacagaaagagacgccacagaatacaatcacgactctctccctcctacggactccctccccacaagcaatcaatgggctggtctcagacaaagacacctagtcaaggctggtgaaacctgctctatttcctagtaggcctccacctgtaattctcagcagtttgtgtgtatagatagaattcctgccttctactaatgtgactgttcctgctcagagatctagagttaattattagcaaattcacagtgaaccagagctaggtcttgctgtaaggctcctgtgttttttagaagtacgttgccatggggatttttgtccccactgggttcctcctcaggaccccagacagatagatacacaaaccctgggcccataattttagttagaaaaggcccaagcctagaacctcagggaactcatttggaagctttttttttttaggaaacttacctttcctatttgacatctcaatcaaacaggtgtttggggagaataaaagcatactaccttagaagggactggggtcatctggccagacttgtggaataaagagaatttcattccttgtataaaataactctaaataatggtaagctcttaggagacttgatctactggctacatatacccactatgaaattaacacattctggaatttagatggaagaatatggaaattggtccttctcagtgtatggacgaagcatcagaaatgaagagaagggccaagcctagagagcaaaactaaagactcactggtctgtgggcttcctgcccaaggagagctgaaagctaaaggatgcttcacaatgtcctacaagttgtttttctaaagtccttccagcggttgaaactgtgtttatgcaaaacaaaactttcctttgttgctataatctagaggtggactttggcttaagtcatgccaaaatattatcattctaaaccagtaacacctatatttgttgagcatttactatatgtgtggcactatgctaaacttaactaccccttttcctcatgtgtaacagtcaggtgacttcacagctgccttgtggatacttgtgttatttgaaagattgcataaacacatgtaaaatgcttagaagtctaccacctcatcttacctacagctttggtgagtccctgctttggccaagtagaatcattccctgtgaggaggggaagaggataagaaacaggcagagttgaccttacaggtagacacaacaggcgagggtccatgtggtgcaatggatcccatgcacatgcctgattcagtcattctagttgagtaggattgtctggttggttgttattattttgttttttgtttgtttctttcttttgttttataagatggagtctcactctgtcgcctaggctggagtgcagtggctcaatctcggctcactgctgcaacctcttcctcccgggatcaagcaattctcctgcctcagcctaccgagtagctggggctacaggggcatgccaccacacctggctaatgttttgtattttagtagaaatggggtttcaccgtgttgcccaggctggtctcaaactcctgagctcaggcaatcctcccacctcagcctcccagagtgctaggattacagacgtgagccaccgtgcctggccagtttttatcttgaaagcttaagggtctcccacttaaattcaaatactcttctgaggataaccttttaatcagccaactatcatgaatctcaattatcaggaattccagttattccaattatcaggaattctttatatcatcccaggaatctaaaagagcaaggtcttataggtaagggcaaactttctgatgccttggaattcagaccctaagtagagatggtcatttgacatctagtctgatcgactgtagagttacttctatacaaataaattcaagttatcacagggtttctttcagttggggacaatactttgaaaacttttaggctctgaatgaataacttggcaaaagaaaatgttagggtccttcaaataccatacttgttgtggttttctcacagatacaccagtctataaccctgaggtttcaacactccactcagttgtgggctttttatctaaatcaaaactatcacatgcccacatgtgcatctgcagccaaccacaaatgatctaacaggaccagatttcactggagctctgtgacccttctcccagtgtgaactgaagggaaaaaaacctggagcctaagggactcccttttccgtgtcctgaagaccactggctttggttaagccaatatgatgggctcattgagagagagactcaggacctcggatcatgccacactctctggccccagaaggcataccacaggctgccagctttgttggagaacctgagacttaaggccaggatatatcaagagccctgtacccagttctgtgatgtcttaatacctttgacaagagacattggcaactcactgggtgtccattggggggcgacaaggaaacagactgatgaaaccagagaatgtgacaactaattacatgttgtttcctgtagaagagaaattctcagaggaacgtggtgactgtctgttctttaatggactgtcatatgaaagcaggagaaggagattcttccttactccaaatgacaaaactaggagcagtgaaatgagcttataaggtggccgggtttttctagcaattggagctctctgcagtgagtggacacttggcagggtagtgcctactccgcatttgatgtgttcacaccacggctagaagtaggtgtcgcaacttccagttgaagagggaattcttttccttgggtgggagaggggctagagaacgtctcaggttgttgctaactatgagcatggttttataattgtttaaaagtgggtaaacaagaagagtgtgtttatggtgtctgtattccacaaactattatttcccacattaactgtttcatatatggaaaatctgagaaacaggaatgctaacaaggttgcagtataatttaaaaatacttctgagagatcattgtatcccaaaggcagtgcccagtgaggttaagagcgtggtttgtggaatctgagcccacaggggtttaaatcctgcctctgcccttcttagattctgtgaacttggacagattccctcacttatttaagacttcacttttcagcccttgagatcccacctgctcaattatctaaatgaaatctatcactgtggaaacagcaaaggcctcctgctgttgagcaaaatgttttccagtcctttgtttctgtgtgaaataaagcagctccatcccagtgctaaatgatcaactgcatatgacagaatgagcttatttcatgctcccagtaaatacaagaccatagactactctggatggtagtttaagtttaagatgaaattgcttcttctgattgccttcttctttattgcttctttctctgttgttccttccttctcttgtttataacactaacagtcaaatctatctgtgtggaaatctatctgctatatagaacgctacatcacaatttacagaggggaaaatatttttgtcggcagtaacatttcactggaagaggcactatttggccacctaactctgggatttaggctcaggtagaatcagtgcctcagtttctttaggtcagccattatgagttgttccttatttgacctagcacatatatagatggtggttaaatttagcaaaattctcttcacaaaggtttcatttgtctggaagactctaagtactgatctggtcagagtaccatcaaagccccttgtttgtcatgagaccgtggaccaacatgttagtctttctcatgtaaaaaaaaaaatcatcaacaaatgcagtgggagttggtagtcatgagtttgaggtagtacaatatccttaaagtacacactcaatcatgtgtgataattggccaactctacctaacaacagttgaagacctccaaacagctatcaggactactggaatcatgtctccagaagaacctggagaaacattcacatttgtgtggaccaaggaggaaagcaacccagacgacttctacttagaagcacaggcacatagagcctgtgttattggcacaggtatttctctcctaagagccttttctgcttaagaaggcttgaggatctattcccattaatcataaaaaagggatttgctgggctaaattattttagcctcctctttatgccttacttcacaaagaattgcagttaatctgtaaatgagttctgatgttatgaaaattggatatggcaaattgtgttattaagtctattaagggatgaagaaggactcttctaaaagaataacgtagtctgagtggcagctctcacttaatagacatctacctagaaatgtttctgaacttaatggacacatgatataattcaaaattaatataagcacacagcacctctccccataaccttattgaaattaagggttccaaatcattcttctctcccttttacttcacctgcaacatgtggctcacccttctttagactaagagctaaactctaatgcctagttaatgtaaaacaatgccaggattattaagcatgattctgataagttttaacccctaatgagattatccttggttaaataaattgaatggctagtggaattccaatgtaaagtcagcagaggttagctggttgctagatatttaactatacataccaggaagctatgaggacaaatttccatttgcacagagccttgagaattggccattttaggactaaatgtgctgctcattacttttactcaaggacatactaatgaccaatatatgtttaaatacctactatgtacaactgctttcaaaaacactttcaatcttgaattgagaaggtaggagatccatacctgtattaggccatcctcacagtgctataaagaaatatctgagactgggtaatttattaaaaaaagaggtggatgaagctggaaaccatcattctgagcaaactatcacaaggacagaacaccgcatgttctcactcataggtgcgaattgaacaatgagaacacttggacacagggtggggaacctcacacaccagggcctgtcatggggtggggagagtggggagggatagcattaggagatatacctaatgtaaatgacaagttaatgggtgcagcacaccaacatggcacatgtatacacgtgtaacaaacctgcacgttgtgcagatgtaccctagaatttaaagtataataaaaaaaaaaggggggaaaagaaaagaaaagaggtttaattggctcacggttctgcaggctatacaggaagcatgatactggcatctgttcagcttctgtggaggcctcgggaaacttacaatcatggcagaaggcaaaggggcaacaggtatgtcacatggccaaagcaggagtgagagagagaacaaggtgccacacacttttaaacaactacatctcatgagaagtcactcactatcacgaagagagcaccaagggaatggtgctaaaccaaggtccccaacccccaggccacggatcagtattggtccatggcctgttagaaaccaggccacacagcaggaggtgagtggcgggcaagcaagcaaagtttcatttgtatttacagctgctccccatcgctcattactgcctgagctcagcctcctgtcagatcagcagcagcattagattctcataggagtgcaaacgctattgtgaactgcacatgtgagggatctaggttgcacactccttatgagactataatgcgtggtgatcggtcattgtctcccgtcactcccaaatgggaccgcctagttgcaggaaagcaagctcaggactcccactgattttacattatggtgagttgtataattatttcattaaatattacaaggtaataataatagaaataaagtgcacaataaatgtaatgtgcttgaatcatcccaaaaccaccccctctctgccccgtcccagtccatggaaaaattgtcttccacaaaacaatccctggtgccaaaaactttgggaactgttgtgctaaaccactcataagaaatccaaacccatgatccagtcacctcccaccaggccccacctccaacactggggattataatccaacatgaaatttgggtggggacacacatccaaactatatcaataccttcataaaagcaattaaataactgtacagtgtgataggcaataaatgtcaaatgtcatatgtatgaggaacatagagaggtgctgttatcaagtcactgtgtgacccactgagcactcgcaatgaggcacaggtagtaatgtacctgctcacttgcttattgttgtcccaccacgctgaattgggagcttcatgagagcagggcccatgtcgcatctattaccacaactgccttattcgcgtggcctgtagctagcaatcagtaaaaaattacagcatggatgaagctacagaaagaaagtaaatactgacaggtgggcaaaatttttagatatggatatttaatgatgggatgaacagatgaatcaagacaggaaacaaggcttcgcgtggcaaatatatcctttcatttgcccagcaaacatttgcagatccctcactatgtgctagacactgtgggcacatttctgtgtggattggtgtttttctctctcaaaactggagagattttgagatcagcctgtatgtagtgagatgaagaggtatgtggttgagatcaggagtagttgggattctgtgagggatagggctccttaggtgtagagagccttgagacctttgttgtgaggatagtgaaaatcaacaaaagaatttatgttaaggaaggttaaaaagtcactctaaaggtctcagaagtgcctatgacatcatgaggagatgtccattcctgaaaactttagccaggttacaaacactttaagaaatcctatctcaaaacttcaagaaaagtgagatctgtatttacacagatagaatttccaggactggattatatttgcacttttttgttaaatttttacttaactagtatattaatattgatagtactttgtgacttttttcataaatataacttttaaaaaatatggtatttctaaaaaggtttggtgcattgttaaaatgtggttttgatttattcacagacagaaatcttctctaacagactatacttccatttcgtaattcagtgaggtaatgggactcagttatactaaatttatcatagagcaaactttgctagttttcatctgttcattacattttatgtaatggcagacagtgtaataactaataccgttaacccaaccatctcttccctataatgtttctataggaacatacagtgtacattttgcagttctctacacgcagacaaattctaccagtgtgtattctgattacaagctagttgcttcataggccatatgtctatcttcagtccctatgaatcatgtaaattacagagcaaactgccgatactcagtatatgtatatgacacataagagtcaagtatactcagctcctaagagcaagtgagaagacaaagaagatctactgtgtgtagaaatacttcttaaatcatctttcctgaaggcctagtttgcaactgagtcgcaaaaatttggtttcaaaaagttaagcttgcaataataaaaagataacccagtttaacaatgggcaaagtgatctgaacagacatttctcaaaaaatgatatagaaatggccagtaagcacaagaaaagatactcatcatcattactaattagggaaatgcaaatcagaacgacaatgagtcacctcttcacagtcactaggatggctatgattaaaaaaaaaaaagacaggcaataaccagtgttggcaaggatgtggacaatttagaaccctcatacactattggtagacatgcgaaatgaaatagtcatttcagaaaacattctggcagttcctcaaaaggttgaacataaagttactaggtgaaccaacaattccactactagctatatatccgccaaactgaaaacagatactcaagcaaatacttgtacatgaatgtttatagcagccctattcacactgtccacatacttgaaaacaattcaaatatccatcaatggataaatagataaacaaaacgtggtaatttgtacaatcgaggattcagccatagaaaagagtgaagtactgatacatactagaacatagatgaacctcaaaaatgttatggtaagtaaaggaaaccagtcaaaaaagaccacatactttatgattccatgtgtatgatatgtccagaatagggaattccatacagacaaaaagtagatgagtgtttgccaggggctggggagaggtggggatggggaatgactggctgatggttagtttccttaggtggtgaaaaaaatgttttaaaattgattgtagtaatggatccacagccttgtgaatataccaaaaaccactgaactgtgtaggggtgggttgcccctccacacctgtgggtgtttctcgtaaggtggaacgagagacttaggaaagaaaaagacacagagacaaagtatagagaaagaaataaggggacccggggaaccagcgttcagcatatggaggatcccgccagcctctgagttcccttagtatttattgatcattcgtgggtgtttctcgaagagggggaggtgtcagggtcacaagacaattgtggggagagggtcagcagacaaacacgtgaacaaaggtctttgcatcatagacactgtaaaggattaagtgctgtgcttttagatatgcatacacataaacatctcaatgctttacaaagcagtattgctgcccgcaggtcccacctccagccctaaggcagtttttccctatctcagtagatggagcatacaatcgggttttataccaagacattccattgcccagggacaggcaggagacagatgccttcctcttgtctcaactgcaagaggcatgccttcctcttatactaatcctcctcagcacagaccctttacgggtgtcgggctgggggacggtcaggtctttcccttcccacgaggccgtatttcagactatcacatggggagaaaccttggacaatacctggctttcctaggcagaggtccctgcggccttccgcagtttttgtgtccctgggtacttgagattagggagtggtgatgactcttaaggagcgtgctgccttcaagcatctgtttaacaaagcacatcttgcaccgcccttaatccatttaactctgagtttgacacagcacatgtttcagagagcacggggttgggggtaaggttatagattaacagaatctcaaggcagaagaatttttcttagtacagaacaaaatggagtctcctatgtctacttctttctacacagacacagtaacaatctgatctctcttgcttttccccacagaactgtacactgtaaaagggtgagtttgtggtatgtaaatttatctgaatttttaaaataaaaaagaaagttaaaaaatgttaaacttggaattaatgatggtttttttgaagcagattagtaactactgaaattagtccttgatttttggaaaagcctttaaaaaatggtaagtgggagaagttataaacaaagagatgaatgagtcacagaaaattgggagacaaatagatgataacaagggacagtacagaaagactcaactgagttttatcaaatcactcaggcagataaacatgggggctgcatgtgcatccgtatgtgtgtatatgtttatttacatctaatatacacacatgatattacatgaaatattataacatataataaatatatattcatactggaaaaattctcaaagaatataccaccaaatgttaacaatagctgtccctgtttagtgggatttcaggtgacttagatcctttccccctttggcctctcagtatcttgtaactttgtgtgctaagatcattgatagttgaacaataagaagaagaaagtgagtgtggaaggatgttgctagagaaagtgtattcttgattatatggaggaagtgggggcagtttgtgaagtcttccttacgaatagcatcctatttgagaagaccagtcttcacactggaaaaaatgcatagagcaaggtgggcatcacttgcagaacagtttggcacaggactacctctgaaatattaaggcttaggagacttgttcttagaaactcttcaggcaaagtttacaaaaggccttttcctccttgcttagcagattctcccaaggcatccacatctacactctccgtaagtcactatatactggacctagcacacatctgtctacccatcattgtattagtctgtcctcacgctgcttataaagacatacctgagactgggcaatttacaaaagaaacaggtgtaatggacttacagttccatatggctggggaagcctcacaatcgtggtggaagacaaggaggagcaagttgtgtcttacatgaatggcagcaggcaaagagagagagcttgtgcagggaaactcctgctttcaaaactatcagatcttgtgagaattattcactattatgagaacagcatgggaaatacccgcccccattatttaattatttcccaccaggtccctcccacaacacgtgcgcattatgggggctacaagatgagatttgggtggggacacagagccaaaccatatcaactatctatctatctatccatccatctgtccatccatttatctttaattgggatacgtctacaagacaactgatacctaaaagtatgggaatttcatttgctaagtcacaaaataacttttaaaccatccttatattatacctaacatgatctgagcacataatattgtctaagtcagacccattcttgcctctctgagcttacactcttgtcaagtgtgagccagaaggagttggtccaagtagagcaagtctcacaggctttgtggtactcagggtgggggtcttacccaacatttcctcccagaagctgaaaggcagagacaagaaattcatcctgaaagagttcacaagggtaaagtcaaggtggctggtccccagacaggtcataggaataaggttctggtcatacaacaggaggcaaggagcccaagtagagggacttgggtgtggggcaagtgggagggtttcattgaaaaactaggtagaagacagggagtaatggtggataaggcaaaggacagcatctaattcaggcctgtcatcaagctagagaatgttcacagcagtgttgtttgaaagagaaaggcatggaaaacactttgttgtctatcagcaggtgtgaataatttaattgtggtgttttcaaatagtgagatttccagcagaggaaattaataaaccagagctgcatgtgtcgatgtagaaaaaaacccaaagtgtccagacatggtggctcacgcctgtaatcctagcactttgggaggccgaggcgggtggattgcctgagctcaggagttcgagaccagcctgggcaacatggtgaaactccgtctccactaaaatacaaaaaattagccgggcgtggcggcctacgcctgtagtcccagctacttgggaggctgaggcaggagaattgctagaacctgggaggcagaggttgcagtgagccgagatcgcgccactgcattctagcttgggtgacagagtgagactccgtctcttagcaaaaaaaaaaaaaaaccgaacacccagtgttctcactcataggtgggaattgaacaatgagaacacttggacacaggaaggggaacatcacacaccggggcctgttgtggggtggggggaaggaggagggatagcattaggagatatacctaatgtaaatgatgagttaatggatgcagcacaccaacatggcacattcatacatatgtaataaacatgcacgttgtgcacacgtaccctagaacttaaagtataataaaaaaagtaaaaagaaaagaaaagaaacaacaacaaaaaaaaactaccctttaaaggaatgcatataaacaataatttatttctttcacattcatttcacagtttgcttactgaagcatcagtgtgtctttcaattggatgtgatgtgttttgaagacataagaggcaggaaagttttggttgccaaaaataaagagaaacagggaagaatttagcttctgaactggatggtcactcttgccagaggccttggaggagggcaaggttttgcattttgtttgccaattttttccttaaataaagtgccctggacttcaggtcagtcttgccccttgagctgctaaatgattctgccagattctttcagctgagctgtgcggggtcctgaagacctgctttgacttcctctgcaccaaactgactcactccccagggaacaagatcaaggctgaggaagagaaaaagcagggcatgaatggaccctatacccaaaatagtaattccattttctccacctgccattctaccatcacagtgaagcttttctaaattgtaagaggctcttgtaaaaatgaagccactcctgggagatgttgaattttatcagccaacatgtatgtgggtgtccatggaaaacaagaccttggcaaattataccacaaatgggctggggcaagtgggaggagagtgataggagaacgtttgaatcaggacaaaacgagtgaacaatgtggaggcaaagggtgggaacaagatgtgctttgccaaccagacaagtttttcaaggctaatttttctagagaccatcttaagaacaattgcaacactagacaaaaagcacacaaaccaaaaaaagaaaaaaatctaaacccaacagcctaagtatcagaaaccatcttcttatccatatggttaaaaagtcaaaatgaatttattacattttcacagaaccatttcctgggccggaactcatttctccttaaataaatactataaaattttcctcagaacaaatcaagtcccctctataaccccagaagacaaagtacatcggcagtaaaaacagacacaaagtctccactgttgtcagaggtagcatggcctggtgggaggacagggagctcatgctgccgcatcagtcgggaggagggatttgtcttctccacagggcaggatccctacaggaaacaggacaaactgagaagggcttgacaatggaactctttacaaaggtgtcagcagagtattcaaaaccacaggagaattgagtgtcagggctagcaactgtacggttccagagccaacccatgtcggaagggtcagagggtgggacagtcaccacaaccccagaagggagagttctgtagaaagggccatctggagggaagcagtgaccttcagtcagcccaaggtgacagccaggcagcaaggagatgagtaccctcagcctcactccttcccttcctccaacctcctaccaagcctccctgtgggtcaagctcatcctgggagtcagaaggcaagagagcccctagatgcagtccacatagttcagagcaggttgcaggtcaggaagggtgaagacaggagaggcaaagggaagacattgggcaggtcttccagctcacggccctgtcatgcctgcagtcactgtagtacagactgaatgttcactgtgtcctgctttcagcatttaagatgcctctgagataaagagcctgccttgagtctcacgggacatgctcacattttctgaaaccatgtagcttgcactgttaacctcttcctcggtttagaggttttaggggctcgtttcacaaagctgccccagcccctcatgttaaacaacctgagggctgtgactgggcaaaaaataaataaatacatttgcattcaacattgacaaaatacacacttaagtgagacttttttgcatcacaaaaaaataagtttttacttttttcaaaaagtaaaggttctttaaaagatatcatctagagtagaattaagggctattattagaaaatcacagtggtccctaggcaagacattttgagggatgaacttaagcaggccccagactcacgtcttccatgtcctacaacccaggcataccccatcatcccataccttcaatttatccaaatacttcctgtttcagttggcaaattccactgccccaagcttccaaatgtcttccactgctggcttagccttcttcctaaatcccctccccatagtgtcctggaccccattaaaatgccagcaatgaaagcatctcctttcccctgtctagcacagccaggtacatctgttctgagtggtcagtgcccaaaacagcccagttgctaaacagtttgaccatcacctatgctcacacaggagttactgagatgatggtcctcaactgcaaataaaaaaacacaggccactctgtaggagccattagctcacaacttgctgggcaggctcaagttttaggactcagcatgctgaataacacctctatccaatggtaaatttctctggaaatgaatccaaaaacctctcagatgacagatcctgggactttcaagttgttacatagcagcaagggttgctgtcatgatttgtttactctttgattccctgctgtggctcatttgagatcttggagtgtttgctgcagtaattatggcaggatttttccagagtggttttagcatcagtgaaagaattagtgttcattactccttaattctatcactcaacaaattataggggtaaaattagatcctattaaaaaaaaaaaaaaacagggaaaaacagcaaacagaaacaagccggaaaagaggaaactaaattcaccctctaatactgataagcaattcttccctaccactaaattttaaaccttcatcagagacagtactttgtccgtttgttcaatactttattcttagtgcctattacagtgcctggtacatagttggccctcaatatatgtttatttaatgaactgattaaataaactagactcaggctctgacccttgtgctaaatctgtgctcacaatagatgttttagggcatattaaattttgaagtcagttcatctctatggaatttataggcaaaggggctttctttttttagaggtaggttcttgttctgtcacccagactagagtgcattttgcattttgagtgcagtggtgtctgccagtcagactagagtgcagtggtgtgatcatagctgactgcagcctcaaacttctcggctcaaacaatcctcccacctcagcttcctcactagcagactacaggcacatgccattgcacctggctaattttttaattttatttttttatttttgtagagacagaggtttgccacattgcccaggctggtctaaaactcctgggctcaagctatcctcctgcctttatttctattttgaagcaaacaaaatgatgcaaatgaataaagagtcctaggaagaagtgtcctctgctcttgactgtccactaactccagacttcatagtggccccctttgcttaaggcatatgataaacttctaatgatgcttgaattatatttccaccagcaggatcagttattttcctcagactcaaattttgcaatcaaaatgcacagtgtacacacggctgcttatattgcagcacatagcatctattttaccatttcaatttgtgtgatttcttacatgatggattgtgggatgacaataatgtgttctcagtgaagcctcttgactaaaccaaaatttgcatttttataaacctccatgaaacagctttacttagtaagattctataatgctatactaaagaaaattacgtggtagcttctaaaagaaatactccctccatcacagagaccgagcctcatatgaaaacagtaagcagcacacaggaaactcatgctgtagatgaatttggagagccacctcaggttatctgcattatagaatgctaaacgcagactatgcaagaaaccagccacctagagagatctatatagaagtagagaaacttccataccaccagcaattttggctttccaataaatattgagtgatgtccaaaagtcgtataattcaaaaagtctagggtaaggaacaagataaaagctaaccctcgtgggtgttggtaaatcaataattaattggagatcttccatgatatttcctcataagaatcattgctaaaattgttgtaatgactacacagactcccaagattgcaatagtcaaacaacacaaactgttgaagtcatgaagggatatgcaacatggctccttggttaaccttttggtagggatccagtttccaccatcatgaagtcctgttttcaatattaatttacatcattagaatgcctgctgttccatcagcattttcttgagatttcctgggccattctcagaaaccagagttagaatgcagaaattaatcatatttcattttgacctaactattatacccagatatttataagcctgaagtatatttttgccttactgataaaccaataagaaagaacttgaatatctcataaaataaggtctttccgcaagccacacatatctagatatggataatagagctaaataatcaggtgtcgagtccaatacactgtcaatctatgtttgacaagcatccagttccttgccttgagtcattcagttcttcgttgttcttgctggaatgaaagcctatacaaaacctagcattaatgaagttaatatgaaactaattagctgcaatgctactgcgggaaaacggccaatcatcatttaatgaatgattctcagttaagcacttcagaaaagtatttcctctgccccataatcacccagcttcatgaagatcctgctttccaggtttgaggtgtgggatccagattcacttataacctaatcaggaaatgaacaggatgatcttgtactgaagtcctatattagtaatatatcaaatgaataaagaaaaatgtaaataaagttagaacttgtagtatcgttttatcaactcgcagtatgtgaaatccatgatgtacctgcaccataaataaaacaagatcttcaaacttcccagggctatttaattcttccatgatttttgttcacaaagaacaatcattgctcagcctattcattgctccttttggaatgaaatacttttattactattcacttcaaaatatttttaaatttctgttgtgattgctccttagacccacgggtttattaaaagtatattgcttatttttaaatatttagggatattttagttacttgtctgatattgattcctaattcagtttctctgtggtcagaatgcatgttctgtatgacttcaaccctttgaaatttgctgaaacaatgttatgattcaggatatggccttggtgaatattccatgagtacttaaaaggaacatacattctacagttgttggctgtagtgttttattatataaacgtcaattaagtcatttcttaatcatgttgagaaatcatctatgcccttactaattttttattttcatgtttaatcagatatgagaatggtgcgctaacatcttctatgattgtgtatttgtctatttctgcttttagtcttggaagtttttgctttgtatattttgggtctatgtaattagatgaatgtagatctttattttcctgatgaattgacccttttatcattatgacatgtcactttttatatttaatagtatttcttgcattaagttttaatttatctgatattatgtataactctaccaactttcttcaggttagtgttatgatggtctttttttcccatatctttattttcaaccttcttggtccttattagagtatttaatccatttacatttagtgtaattactggattatttgaatttaaacctaccatcttagtatttctttttctgttgtctcacctattctttgtttctattttaatccctgcttgcctttataaaaattttaaacaatgacaatttttaaaatattttcatttatcttctttgttaccttattaattaggcctctgttgtaattcacctagtgctaacccagggattatagcatccatctttcactcattacagtctacttaagttaacttagtcctttagttagcatcatttctgtcttccatactactgtatgcgttttaattctacatatattattaaaattataagacatttttattgttgttttaaatagtcagtttaaaaaatgtaccctatatttactgttttcaatgaactttcttttttcccacattacatacttccatgaacacctccttttggcctatagaactcctattaatatttcttttagttcagagctgctggtatgtattttctcagttttagtctgggctcactttctgtgattctctcatccctggattattgactttcaaaactcagtcatattggcagcccctagcccagtgacactgtctcaaatcccagaacaatttatttaatgccacatctattcttgctccaaaaattggcaaatgcctcaagaagaaatgaagagaagccagtatgagactcgcctcaatctacttcccttttctgtgggatcttggatccctctcattgaccaatatctttaaagagttagatgatagatagatagatagatagatagatagatagatagatagatagatgatagacaaacagattgatgttatttttagcagcagcattagtgtgaataagctactccattttagctagaggtagaagtaatttcttcttagagaaaaagtttgtatagaattgaatttaccatcatagccattcttgaatgtcaggccaattgaactcctaagactctagcatatacaaaaaacagaaaccactatttcttatcatatgtttaagggtgtgtatttggaaccaatttagccacaaacttccagatgatgctgacataccaataattactattaaaaagcaatataatacacagggaaagcaaatatagtcaattgatatatgagctgttgctcttattgcaaggattgtaagagttctgcagtgtggccattatatgtgtgcctcacaacttgtattcattgtaagcttcctttgagaatttttatctaagaataagtctaccctcattttttgtggagtatcagagcttcttctcctatttgtcttcaagattgaaaggagaatattgaatgctgattctctgaacatctgcaataatgtattccaagatattggcaaaatcagtccaaaggctcaaccatcccagctaattaaattacctggttaactctgtggactaccaaatctaaatggatgtaagagaggaagaaatttgaaaaaaataaagattacacagttgaaaaaacaagatattctccagttatgaattcttttccccaagagtgtcttttgtgtacattgttattacaaaatccagttgtcacattaaacaagccatgctatccaaagcagagttgattgtggctggaaatttattccaatattgaaaagatgtgaaagggctataacacgtatcagacaatctagaattgaccactaggggacatgaccatgaagccttagacaataattcatatttagtttgaagtactattctgaggcaaaacaaacaaaaaagaatgattatggaggactcaatcttaaagtgtctccaagcatgtcttgttctgtctcaaaccttggcctcaacaatcaaagctctgtatcattatttgcaacacatgaatgctaaatggtatcatttctgactatggacctatgtgtagttaagttgtgtgtaggaatatgaggatagaaactattactatcaaccaaatggtaatattggacatgtttcaaagattgtctgaaagagcttgtccatggagactaacccttaacaagtcccaggtttctcctctcctagaatgtgaattccacgttcaccagcagaattcagttctgctgaaatagtcatggaacagtattgttttaatttctcaaacttttcaaccatatgtttataaaggtttataagacaaataagactatccctggcatataattctttcagtaaatacttcacatattcttccataagaattagcctcttctgtaaactctggagctaccccaaggtaagatcgtactactgtaaataagcccgaatcactagattccaaaggccaatggttacccaggcattatttgtttatgacctaagaaaataagtccatagaaataaattggcttgaacagaaccatcaaaaacccctttcaatagacatctcaaatgaaataggtggttctacttcctgagaacacctaaagaacctttgtgtaaaagaagaaatcattatttccattcagtagcaatttttgaatggtgtaacttgctatctccttgcctattggtacaatgcagagaaactgttcaaaggtgagccattcggtaaagaacgatagagttaatcagagagtctctgttatgcagctacatggaatgcaggtgttcattgctggtgtttttacccgctttgagttcttgtttgtttttgttcctatagtaggatgctgcactgatttgggcagggcaaagtggtggttgatggaagagcagaacacctgggaaagtcatccagagtaatttttgatcccaagaaaagatcagcagaattctccttgagtctctaagtcttcacattgtagaactgcttaggtaaaaactaattcaggaaatgtgcagttataaaactttaataagtcacccattaactgacattttaaatgtaaatgtactaaggggactctttatttccctctcattcgtaagtggaccatcctcaacacagagacccaaaccagaaacttaggaatcatctttgattactctctttcaatcttatcaaatcttattagcaaatcttatccctgaaatctttgtccctgaaatatatctcaagtcttacctgtcctcaccagttccaccgctaccatcctaatcctggcatcaactctgaactggactgagtcctccagcagcctggttccactgcttctattttttttccattgtctctctccatttcattgtacacacagttgccaaaataatattttaaaatctgtatcactaatttaaacgcttgtggcttttcagtgtacttagaagaaaatccacacttgtagaccctgatgcattcagcccctacctgcctccccagtcttataccagactccatttctcatatattgcagccatgcttgccttttcaacatctcaagcaatcgaagtgctttctcgatttgagactttttgtgcttgctattttcattgcccggaatgccttttctgagaatctcaagcagttgactcctctgcattttttatgtataagctttacatggttcatattcagagatcccttccctgagcacccttagtaaactgttcttggctttgttgggtattattggaacttaccactgcctataattattatgtttgtcatcaggtttacttgtttcttgcctgtgtcctccactagattgtaagccccagatatcagctaattggttgtataagtttccattctttatatagtctttgaatagtaatcatgtacttagtaaagccactaaggcaagtggccaaggagacgtggacagttatttatatctaatccaatctgaagaattattccaagcaaaaatgacgtgactgacggcttaaaatagctaaaaacttatttagttctatctcaaacctcagcttcaataagcaggctttcagccacatgttttcagtatatgaattgccagagcttcctaccaactagtcatatagtgtgtctaccttaacctggtacctttacttgggttgcatttcatcagcagccaagtccatctatttgtcacagtgtctctagtacactgcttctacatagtcagcaatcagtgaatacttgatgcctgcatgcatgaataaatgaacttctcaggaatgctagggccagagaaagttgatgtttaaaaagttagaaaatgtaggcacttgagaaggattaagaaattaacataagccttctttgaatttatcattgaaatctattattcaatttacatgtacaatttcagcaatacatatacttcctttagtcaaatacatctccctgtagcacttaccatgtctctgaccctttgccttgcaaattccactctgataataccagcagtgaatagaaatttaaaaagccactgtcctcactccttccactcatgttctaatgtaagcctttcttttatgcagcctgaatgcacaattcacttgtcattatctcgcatcctagctgctcctcatgaaatggcattcctctggatttgctgagtcctaatgttcaggcaaagtaaatcccacatcattctggcaggctttcaggaagacttagggactcgttgtctgctagtgcaaataacagcaaagtgtggtaggacttcctccttagttcagcgaagagccaggtccttgtcgcacggccatgaaaaattaggctcacagacgatttcgagggggagaaaaatgaaatttattgggcaaaaatggggaaattagaaacaggggccctctccaaagccagagtccctgctagagtacttcccacctcacaggttgaatcccaggtgccacccaggaagaggaggggccagactcctcccctctgccagcagagcaaacttctgtggctccaccccagtgtgtattcctcccagtgcgcaagtcggttggagttttctgggaaccgccttcccacctggctgtctcaaaaggactcccagttgcagaggtatgtgtgattcaacaagatccactggcagaaaatagaggcaaattaactcaaggagtccattggaatatatcaacgtactccccttccactcacaaggcaatgatttctaaaacagtgaatcattttacttacaaggggtcacaatggagacaggatagaggaaactgcccgggagacacagggacgaggcatgtggagaggtagaccttggatccagttctgcagccagtgagctgctcactcagacctgttgctcccctccagagcctccctttcttcatctggggtatgaaacaactggaccagcttatctctgagatcccgctcagctctgaccctcctgttggagaaggcttgcattctgagactgcagtcccaagtagcaatctcttcggagggcatgtatgtgattacgtacttagtgtgctcacatagtttcataagaatccggtaaaattcattcttatgctacttttgtattcccacttattttgaatggaaaatccttgtacatatttcctcaaattatggataaaaagtatacaaaatacaccctagaggccaagaagctccttttggtagaaagaatgttgagccctatgaatttgagctactcaaactttgtggtttgttttgggagccaatcttgaatataaaatattttttgatccagcagaaaggtgaaatcacattgaagtttacaaaatagtaatgctaagatagatagattttcttgtgtgccacacttatgttgtaaccagaacttaattcaccataatcattgacaagtcttttgttactggaaaggataagggttggcaggtcttgtgacaaatgttagaatttaatgcccaggatttttcttgatgcacaggactcattggaaaagcggcagctatttattgtgactatgaatcacgtccacagatgaatatgattaagtgctaaatccatagcagctcaagttttttaaagccttggaaaattggctttaaaaaatatcacctgacaaacctcaagctttttctgtctcacaagacttttggaaaagaactaggatcgacagtgttttaaggctcacaaggaaaagaatctaacacttgtaaaattatcttctgtgcaagttttattttccaacgtgaatctgggctgccaagcatactggctctagccagatcttcattagccgatccaaaaagacagtcggggcatttatccagataatgcaagccaacactaccctctgagaaaacaaaaagtaacttgcctgatgaagcaaggaacctcaccgattattccagattaatgcatctccttttactggcaccatgatcagatattttcaagacaaagtacttggcaagttggaatccagctgggtcctttgatttttgaattcactttgcttctgtgattatggccacagttttgaaaataaagtcatgtggatagagttgtgatttttagggatcaggatgcctcataaaacaacaatgctgtattcttttgtagaacaagatcctgcctaggcctctttcctagtattaatctttggtcatgatgaatgtgctcccaaccatccaacctatccctttgcaaccaggcttttgtgagatcaaataatttttagagttgaaatgaagttattaccagctctaaaataaggtactacaggagggaagtaaggaccgacaagagttaaatcactttctagggttgcgcaggtaactgggaatgaagccaggatgacaactctacttgctctttcattgtatcttatgcttctctgatgtcttccaagggatagcaatataatcaatagtcttgaaagaaagatctttgtagagaaagggtcagcagattatgtttgtaattgactagatagaagtagttttgcttttgcaggttaaatggcctctataaaatgtaattacccaatgggttcttcctgcccactacacaaagaccacagctctgcagtaaagagtttaactgacacaaggccggccacgccatgtgagagacagagttattactcaagtcagtcttatcgaaggcttgtgggctagtggtttttcaaagacagtttaggggaagaggtgggggtggctaggaaatgggtgctttccactgattggttgaagcggagaagaaatcgtaaggggtcaaagctgtcctcttgagctgattcacttataggtggggccctaagggtgatttggcaggtccgggtgaagccatctggtacaagtggagccaaccatgtcagacatgcaaaaaacctgaaaacatatctcaaaaggccaatctgcaatagtgatgttatctgcaggagtaattggggaatttgcatatcttgtgaccagcctacaccttagcagaattcaggctcctctcctccccatagactggggctctctcatggctttacaaaggtggttgacttttggggaggggctattatcatttaaaccataacctaaaagtcttccaaagttatcttggcctcagcccaggagtaattaaggcagcttgaccactaaaggtaagagcagagatggctaaatcagatctccttcactgccataattttctcactgatacaatttttgcaaaggcattttcacccactacccaactgtgtcattgtagcatgaaggcagccatagaaaggaataggcatgactgttccagtggaactttatgaattaacactgaaatggaaatgtcatacaattgtgacatgtcacagaatatttcatttttaattgttttcaactattcaaaaatgtcaaaatcatttttagcttggtggtggactggatttggtccagagcagtagtttgcctgcctctgttatagagtaacacatctgagcccatgagagaattgatcctgtaccttgggtaatgctcttcctctctggctcctttctacacctcagtcacttttcccctgcaagagtgttgtcacattagactgtaaaattggatcacttttatatttcatctctaacatgccttatttaataaaagtcattctaggtatgactaaagttccagggctaacttagaaaaggactgaagagaagaattccttctgacaaatgcggacccagccacaaatgccagtgatattgtcccaagtattggtggcttgggttgcacttgataacagagggcaaaagaaagtataaattttgcttgttaacatagctttagtggaaaatacagaaaatgcccccaaactccatgctaagatcatgaactaaactgttacaatgaaaggaattacttgggtttctataaaaacagctgcctcaaggaatttgccacattccttgggtctgcctgagctctggtggcccactgcttggataggcctggtttgtttgctaacttaacatgcttgcttaacggccaaacattcccttgaaattcaaggactttctgtcccgctgacactgtttatttgtatcagtagagtggagggctctctggtgacactctagttttttctgggttataagcagatgcaggtctgtagtttttctgacttggatggggccaatgggtctaagccaagaggaaaatgcttttttctttttcgtgtttatttccttttttttttttttcctatcttgattggagtacccttagaaggaaaaggagagccataatcgttctctggaggccaaaagaaggccgaaggatgccaaaaattgtcacagtggtgacttttggctggagccagtgcagaatgaggggctatgagtgtgtcactagaactgtaatccagatctcttccatgaggtcaggaaccctgattcgtattgctttttccatgctgtagaacatgacaccccactcaatcacttgtgctggttcattgttacttgttatagtagtcattgttatcaagactttttggttgtaagtgtcagaaacctaactcaaacagagctaagcaaaaataaatctataaataaatataattagctcaaaagtctgaactcactggattgatcttcagacataattgcatgcagtgttcaagcagcagctaccatctctccttcccttcctctctcttatctctgctttcctctgtgttaacatcctgctctgataagctttctccatgtggaatgaaagacgggctccagcctttccaggctcctaagttccttgcagctcacggtcccagaaggaaagagattgtctcccagcatctgtctccataaaaagaagccaccgtccttgcttgagtcatgttctcactcttggacttagcagagtccagaggggcttggatactctcacttggatactctcaatacgtgccagcaaggggcacatattcacccttcattgggcaaggtaagcctgttaacagtcccactcgaatcatggggagtaagcaaaaggaagttctgaaaatgaaagaatgtgggacagacataaaactcaaagctgtgcactatgctagtaaattattcttgtgtacttaatatgaatatggcttttataaacagtaagcaaatcagaagccaccctgtgaatcatcagttatctctagacatttctggattccttctttattccctgataatcttctttccttcctttcactgcgttgtaagtggaaataacacaagccaaaaagaccctctcctgctctcaatacacacatggtctagttcaggaagacaacatataaacagcaggcatacgagcaatttcagtagactgtgatgcctgcccagggtgctcgtggtctacctttcatggaccaaagacaacaggaataagagcattcatcttcctctgctattgtgagaatatagacagtgcaaagacttggatgccagtgctaacatccctgcctgacctgactttgagaaaaggaccgccattttcagcacaacccacaggttctctaaatactcaaagtgtgaggctagcagataaatttggcttatagagggagcttcataccatggttagaacacagcaagaaaggaacaaatttttaatgtattaattgaaaatcagatttctcagctgggaagaagatattagctggaacacacacaaaaaagtatttttaaaggtgcccttttaaaggctgccaaaactcacccaaagtagtattcaaatatgaagacagatgtcttttcaagacgggaaattttagttccgagtatgaaagagaattttatttatttgttttttcccttgccttttcaggcttttcactgacttcgaggggatgagggtatgtgtgcttaaagtagatgccagagtgtcttcttggaacttcaggtttccatgagtagaaggaagtgttgaatgaatgaggacccacggccctgtccagtgtggacatgccataaccctgtgctgagcttcctcatctgtgttctgggcttacattgaatatggcataagcaaccccgaagagccacaaaactctgctctgttaagggaggagggcaagtcctccctggaaggggttgtctcatcaaccaggaaatggtggtcaggatggatacagtagcatctatacctcagcccccttgaagtatcctgatgtccactccccacaaaatctaggccttccataggaagtcaagaggatattgtgctgatataaatttggaccaccagtgagtttgccctcagacctggtaagaagtgcatatttcagatataagatattgctctggcctcagctacatacagtttccataaaggaaaactttgaaggactgcctgcaggaaaagaatagcctcgtgttgatgtatctagggacagaactctcaggcaggacaacagcttcctcaagtcttgtgactacactctttttcccaagatatctcattgcatctttaatttagctcctaattcaaagccaagctcatggactgtttcaagctctggaccatgagcttagctctgaattaggagctaaattaaggatgcaacgagacatcctgggagaaatagtatagtcacaagacttgaggaagctttagtgaaaagcagacccacccagcatgtgtaattcttccatgaggtttcatctcacagtctgcatgtcttgcaagtgggcttagggccacaggggcaggagctcttggtactcagaatgttgtctagaagtttggaggagagagatcccttccaacctaggtcaaaaggcagaactggtaaaggacttgcagacatgataactttgagcacaatatctgagagagcaatccatggaagtcatttgaggaagagcattgtagacaacaggaatagcaagttcataagccctgacctcaggaacctgcccggtacattcaggagcatcaaggagaccatactggccaaatggcacaagtgtgaggaaagtgttggtaggaggtgatttcagagggatgcctggaggccagatcctggagagtcttgtaggtcattgtataactttgacttttactttgaatgagatggtaagcacttatgagcagaaaagtgtatgatttaacttacgttctaaaagaagtattctggctcctgtattaaaaataaactgaagggcaaggagagaggtggagagacccattgggaggctaacgcagacatttatccaggcaaatatcacttagacctcggtggtgcaagtaaggaaaatgagaggaaattgcatttataaaaatctcatttaaagatagagtcaacaggattcatcattggattggattggagtaaatgagagagagagggaaatcaaggatgattcaaagttggttttgtttttttttttgttttttttttttatcttgagcaactggagagatggagacaacattttaaattactttgttctttggtaacatggcagtaaacacacttataaactgtattacaggtggcaatcaaaataagcacctggctgatttgaaatatggtttaaaaaaaattacaaagtaaggaagatgaacttgtattgttctgcccatgcaaacaatctgtaaaactgtgtgcatttatatatttttcagtcattaatatttacagcgggagagaactgtttgtgaaatcatgaattatcttttgtttgaattttattttattaatgagttagaagtacctttgtaagccattgtaccttttttctaaaggtgagagcctaaaactaccatgttgcaatggaataagccctggttctagcttcacgccctgggagtgacttctattagctttggaatctccggtaactcctttaatcctttgaattctcactttctatgtcttaaaggtgatggctgcccatttcatcaactgtgaaatggcatccaagtcccaggtatcgttaagaaccaacggcttccattttaaacagaagttttgttaaacaaatatttggttttacaagggtattataattcatacccttattcattgttcttccttgctcccaatagtcgatgggttttttttttagctgtggcttatgtgatcaaagaggtgaaacaagttagctcaattggttatattctgaaattaataaggtgttctttttgcatgtgtatacaaattaacttccctctgtttcttggccacacacctcacctcagcttcacaaatgagtagaattgattacaacatgaatcagacaagagagtgtagatctatcactgttattgagaaagcagttcaaaaaacaagcattcccgcatgttagtaacatgtttttataaaagctgtaaatgtatatttattcatatgatttaatattttttatcttcagtttttattttaagttcaggggtacatgtacaggatgtgcaggttagttacacaggtaaacatgtgccgtggtggtttgctgcacagatcctcccatcatgtaggtattaagcccagcatccattagctattcttcctggtgcccaccctcccctgaaccccctcccctgacaggctccagtgtgtgttggtccctgcaatgtgtccacgcgttctcatcattcagctcccactaataagtgaaaacatgtagtgtttggttttctgttcctgcattaattcgctggggataatggctttcagctccatccatgtccctgaagaagacatgatctcgtttttttatggctgcatagtattccatggtgtatacgtaccacattttctttatccagtctattattaatgggcatttggcttgattccatgtatttgctattgtgaatagtgctgcaataaacatatgtgtgcatgtatctttataatagaatggtttatattcctttgggtatatactcggtaagggaattgctgggtcaagtggtatttctgcctctgggtctttgaggaattgccacactgtcttccatagtggttgaactaatttacactcccaccaacagcataaaagccttcctttttctctgcaacctcactagagtcagtaatatttcttcaaatatgaaggacttgacctcagatcctttatgatgatcataaatacataaatagataagttaaaaaataggaaggacagtgtgatactaaataactacaaaattagagatgtatcaaaaagtatttaggcactaaaatagttgagagatcattttcagagcctccaagagtttctatgccttgaattatttgagcatccagtgcaagctttcagagtccttgcttccttaaatataaaacaagaagtcagatacctttgcctctgacttctcagaggtctttgagcttgacagttctataattctatgagttttctacctagaaactattccttccattcagttaggaaatatattcaagtatattttatttaatcttaaactttggaatcccattttggtaagctgctgttatttgaaggtgttgacgtatcctctgggatctgagaaaattattatcaaaaccaattaaaggaatcatctattttgtgcgattggttttgaaatctgtccagtgggctctttctggaggcaaggatcctggttaccaagagactttgctgcaaataaggcaaactgggatgacatttggggttgggatccttctcaggaccaaatgggcacccatcatctttgggtctagaagactgcactggcataaagcagctgacttcctgtagccttgcagaaataacaatggggtgtgtgtgtgtgtgtgtagtgtgtgtagtgtgtgcagtgtgtgtgtgtgtgtgtgtgtacaatggtggggaacagttggcagagcaatgagcaagaaatgggaaacgacactcagaaaagcagcaacctaccctgagcaaatcaaagaatttcttagaatgcaacactagctgtgtgtatgaataattggcttgcaaatcacttcctctatttgcttgttatataataccaatcatttcagtgtcactgacgaaagcccagaagggaattaccacttaccagccagttttacatatggcttttgtgaggaataaggccttgaggatgagggtctaaatctctggcccacagatctggacaggcagatttcaagctgatcattacatatcttttgagagagacaatcccagacgaattggcctggggggcaacatgagaaggcaagacaaaagaacattgtaaagacttcacctagaatccaaattgtagttctctcagcaagttatcaagaagcaaattaactgctagattttgtaatccaaagattatttaatctgtttagctttgtgttggaaggatcgctactaatcatctcttttattaaaatatgataatgatagccatcctttattaagtgcttatgatataccaggcactttgtatacatgatttgccttattcagaataaccctgaaggatcaatattattgtctccatatcaaagagagggaaactaaggcatacaaaagttatttgctcaaggtcaaacagcatggtaagaggaactgcaatttcattccaggtcttacggataccaagtccgatgcctgccagcttgcacctgttaagtcatgtgatacttaggaaatgtacacatcaccccagtgcagaggcctttatccacttcccttcattttgcctggattgttgctgtgagtgagaaataaatgacatgaaatgatcatgtatatcactgtcttcagaggatggttagttccttgctctggattgtttttctcttttgttggatatttattttgacttctctgcaaactaaaaatatgcatgctctagtttctcttgggtacataactcccaatatattgtgaagaatgaaactggcctacaaagtttaattaagaagcagtgaactagagcttacttagacaatacttgtactagtgtgggttcatgttgtccatttgtctttagaggtgtagaaccttgaaagtcagctaattaatcactattactgttgtgtacagtattggcaatctcctatgctaaaattttttgtgatgatttgaaggtgggagggggcaatatttactaagtctctcaacctacatggcaatatctgaaacctgcttataatgtagtaatagcttaggcaccacctatttctgaaacataaatcatcccacaatataagcctcccagttttattcatgcgtcttaccatgtataaatatcttttaatataccatttatttccttgagggacagttatttgtagcataaatctgcctggataaaatagtaaaaattgctatgccccagtgaattcagtttacaaaagcttacatacgtgaatgagacattggaaatgtggtttatagttaaggagaatggatcacacggattatacctgtataacttccctagaaggttgataccactaagatattaacaccaaaaaactgaaaatagtatttttcatcttactttgttatgtaccctttgtgaatttctgaaaaacacctttctattatgatgggataaattacggtgtggtaacaaacaagcccaacctgtttgttccggtcaactagttgctttataacaaaccaccccaaaatttgtttaaaacagctatcatttgattgtgctcacaagttctgtgagttaggaaataagacacaacacagtggtcttatgtctgttgtgtaatgtctgggttctcagctgtgaacactcaaatggcttggaaactgaaatcagctggaggcttccttattcatatgtttggtgcctggctgggatgactcagattagttggggctcttgacaaaagcacctatacatgaaccctctcaggagccttggctctatggtggctggattctgagagggagcatgcagagaaaagaattccaagacaatggatgctctaagagaagctacttggccttttctgatctagtcttggtggtcatgcagcatcacttttgccacccagatcaaaggggaagaggagacagactccacctgtggatgggagagtgtcaaattcacacagaagttgtatgcaagctattcttggtcatcttgctcatctatgaaatataccctcctccatgcattgacttacaacaagggtttatttcttgctcaaagtctgctgtgaatctaggcaattctccagagcagctgttcttttgttggcttagcaatccaagctgctgcttccatcttacagcttttccatatcaactcatgattccacaaccattgctacgaggcaagagtagtatggaggatcacacactactcttagaaaccaccagctggaagggacttatatcactcctgcttacatttgatggctcacatagccatgcccaaattcagtagagcaagcatggccctcctgtgtacccagaaaggaaggagagctagaaatattggtaaatagcaatattgtttaccatagcctcagagatattgcctcgtggtgaaaccctataattcccctcaattctgatttttgccctttatcaaatcattttattcattccttcatccatccaacaaagatgttttatatgcctactattagcaacaatcagtagcttgttcctggagggaatgcagctgctccccgccaaaacaccatataattcactctagaaaactaaaatttcagatgctttgtcattgattattgtggggagaaaatgtctctttcagctccgactttgtcctgtctcctctaaggcatgtgaaataagatttttttttcctattcttacctcctatggtcccattttatggttttcatgcactactgtcagtcaaatatttatcatatatctttcaatatctttccaatatttatcatatatctttccccttgtaggccttaactttatgacccactattaagcacgcagctgtatttccagaaaatgtagatggtttaattcaatactgcatggcaattaactgtcttataaattaaatcattttaatccatcttagagttatcatgcataattagtctgacagcacaattctgtttgttgttgttttaaaggaaatttagatatcaaggctgcaaagaatgcgtaagtctaggcagaaggctcttattttccaaaagcagagcccatcgttgcatttcaacaatgaccgcaacaaaaaccatcaggagctgtttggggcctgtttgtgctttagtcttcaattagaaaaaaatgtgtttctgatggaaaaccatagaacaatcctcactctgtggtaagaaagaataaagagaaagaagtgggctctatgatagactgaagcaagaatactattttagactaggtagtggccgggcgtggtggctcacgcctgtaatcctagcactttgagaggccaaggtgggcgtatcacctgaggttgggagttcgagaccagcctgaccaacatggagaaaccctgtctctactaaaaatacaaaattagctgggcgtcgtggcgcatgcctgtaatcccagctactcaggcgcactggctcacgcctgtacttgggaggctgaggcaggagaatcgcttgagcccaggaggcagaggttgcagtgagctgagattgcgccattgcactccagcctgggcaacaagagtgaaactctgtctcagaaaaaaaaaaaagactaggtagttatcttcctgggtggttttggctatgtagaaaatcactcttactctcgattaatttatgtaccaaatcatgctttgaaatatcccactgaaaaggtctaaattattgatatcttgggtcaagttctgacttgaaggcaaatagtaggaaatacaatggcatttattggaggcacacactacaaatattgtagtatctttaagatgtgtttaaataaacaagtagatgataaaactataaattagagtcactaagactctctagcagagacccttaccttttgaagtgcaccttaaaatggcaacaacacttatcagaaattccataagaagcttagttgtctgctactctattgcagtatcatatgtgtgagctgcatgaaaactggatattattattatcaaaggttattatcaaatggagcacaattttattaataacaatattattattatcaaaggttttaatttgctaaaactatacagcttccttaggtcttccaaactaggtcagccagttaaccctcagatctggagtaccacatttggctgagtcagaagaaataaagatgctctcaaaaccacaaacaaaactgataatagacattctgataactttaactcccacagtaataaatcttgggtcttttaaagttggtcagatgtacacagagctgcttactaattatactaaaatagttactaagcaactcgacattttgatttccaagaatttcagataaagattatgaactttatttatttggtgctttagagtccaaggcactattttacagcctaaagctgtatttctcaaggccatcttcttgcattcttctaaaacttaagagggatcatctgtcctcaaaaatataagaaattctgtaaatgtgtatttttgtgtatatatatatttgatatttaaaattctgtatctatatatacttccaagaccccttagaacttacacggtacctgtaatttgtttcttttttatacttaagtacaagtaatgttagtgatacatttaaaactaggaattaccttgtttgcaatatcaaatttttgtaaaatattgagttaaaaaagtctcctaaaattaagatttgaactattataaatggcttcaaagatcctttcgtttctaagagaaggaaggaattaggatttattgtgcatgtatttcataccaggtgctcatctacagttattgaatccttgcaacaatcatatcaggtaaacgctgttattcttctcttacagatgaaaaatctaaaccttctaaaatgaaagtttgtccaagttaacatgaccaattaggagagcttggattccaacccaaatctgttcagtatcaaagctcactctcttccatccttgccccttctcagctcacatagtagctttcagaaaacagtagctatctaccccagataaaattaagcctttttttccttaggagaggctagaaactgaatcttctaccccctttattggcatcacacaggcacaaaaatcaccaattctcaaaaaccctatactcccaagttcaacccaaattgaatggttggaatattgttggtttgtatggaataattaacccacatctaaaaattaattatacaaagtgaagtggagattgaagcagttttctagataattaaggcaaaaataactgcaatttttttaaaagacagtttgaaatatttagaagggtagattgcaaaattatccaacttaaggtagtcatattcagggagtttagccaaaacacctctgaagttcattgccttacaaatgagtataaaacttaaacctatgattaattccctgttgtttttctatctgtattatacatataaatatattttatatattgtcctcctgagatttcaagagcaattttcttctaattcttctaatttcttctatggattcaccatagtgaatccaccgacacgtctaccctgtgacaatcttgttctccatttgattgcatgaaaaataccatatgaatttgacaaatcattggtttttttgtttgtttttctcttttgctgcatatcattgcctatgcttcttgagcactagaatatatttgtgcatgtataaaccaaggcctttcttctgaaaattaatagtactttgaatctcttctatattctggttcttttaaactgtggttgttttaagtttgcctctcttgttttaggatttattctttattttgaggccctgatttttcacaaaacatttttctcaacgaatcctgagaacactggacaatcatagcttttagctatcatgagtcccattaccctttggcctccagttaagctctgtcctgcaagacataaattgtctgattatcaactcctactttgagtgaaaaatggttgaatgaaatgaatatgcagttcatttcaacaaagcaagaaatttgctgtttaaaattgtgtttttataattcttgagatggaaatatagcagacctctgtgaatctgagaaggcatttcatgcttccagaaatgaggggagaagtggcaatgatattgctcatgaacaattggaagcaatgatactagagtatgcagcaaatctcagggagatttcagtggtacagtaactggcctcacaaaagtgggatttattgcattaaatctttgctgtcctttctggctggtttgatatttaagaaattattaaacataaaattgtatgagcagttacctatggtaggacaaaatggactgacctctaatggcttggtagatgggataattttgggaagagagagtggagctcagttcagcatcctactctcctcctcaacatcatttcccattcttggcccttgagtttagataggagttgggcatgtgtgtgtgtgtatgtgtgtgtgtggtgaagtgggtagattcctgttcccaacccaattagataactccacttccatctatcttccttgcatcttctccagctcatttgcaaaagaatgaaagaagccttgcttcaaaaaggtttagagggctaaataagagcacaaactggattttctgaaaactgacctgattgcctgggtaattaaactgtcactccagcaaaagcatttgtctccaaaaagtactgaggttgtctttcatcactctaagtctagacattctgaaacctccatcctctcctgcagagagaggaattaagtctccacatttctaaaccattgacagtctgtggggtgccccattgtgttcctgacttcctattctcagaaggagttataacgatgacaatgatgcatgcatgagacatggaggtcctccccagccctcggttaggaagtaaggcagccacccatgtactgaacacaatagtgctttggaaagagctctgttaaaagtgagtctcaaaaatgtaaaggcctttacgagaggaacttaatctccagtgtgataaaacgatgcacacattacaaggagatggatgttatgaaaacaataagtacacccaagagtacacgtacaaatctgcattgcaattgatttatttggatgcctgtttcttcctacactatgagctccttggggccatgaaattcatttgttttatctatatatactctctttgatatcccccaccctgacagctagtgcagtcctttctaaatagttgttactaaatatgtcaaatcaaatgcctacaaggactggttggtagaaccagattctggaagtgaccaagcaggtctagcttcataagaatgccatcatcgtagatttgagggtcatgatgaagttgtactaggatttatggaggttctttgtcaaccagttcacaccaccagtgacttaaggaaactatatgtcgtctattgggaacagtcctgcttaaagcaattagcagggacaattaatttggagggaagtctctctccactcaacagcattcaaataccctctgcattagccatgttttgaaaaactccaattgcctgagtcactgatagacaaacagaaatgcagactattttgtatgcagttttataaagaagtttctaaccagagaagaaaggtgttattttgaaatattaagctcttagttgttctttcatttcagtgaacatttgttgagggcctgacatgagctaggcacatggcaaagttttagagatgcaaaggtaaattaagacccctgtgttaattctcatgtgggcaaagcaagcacattttttaagttgcaataatgcaacaatggtggtgtgtacatagtagggcaaaagcatagagaaagccatggaaatcctcaagccaagttcaaagagtcctctaatgtatggcataccacaacaaggaccttcaaagggtgcatttggtaagaaaaggcaacctccaaagattcatccaatcctaaggtttcatagagtagggacttcttcccttagctggaaaggaaagaagtcatttggtgtgcagtagacataaattaggggccgtccactttttcttgcaatgattcatctaatggaggagcagaccctggagagaaacatatctcttcttgtcttcattttgttcttcttttattaaatcacccacaggacaaccggatgctccagcaatagattatagaaaaaacagatgggtatttctgtgcagtcagaaggctcctgtgcccttttccagcataaaacgtttatgaaaatcaattttcagtgcctgctgaaccaggctgatgtgagaactagctttccacagttcataatattcactccgggatgatttgacagggctgatattttatcacgaatacaaaggagatgagcaccattctcctaatatattcattacttgtctcaccaccctggtaaataatatgcatatggtaatttgagagacacagtgttcccattgctcttttttattcccagaactctggctgtcttttctaaatgctgcaaatcaaaggcaaagttacctcacgcacctgtagtcccagctactcaagagacagaggctctagaccaggacttgaagttcagcctgggcaacacagtgagaccctatgtctttaaaaaaaattgcctaaaaatttggccaggtgcggtggcccatgcctgtaattggaggaactttgggaggccaaggtgggcagatcacttgaggccaggagtttgagaccatcctggccaacatggctaaaccctgtctctactaaaaatacaaaaaaaaaaaaaaattagccaggcatggtggtgtgcacctgtaatcccagctacttgggaggctgaggcataagaatcacttgaacctgggaggcagaggttgcagtgagccgagattgtgccactgctgtattccagtctgggtgatagagcgagactctgcctcaaaaaaattaaattaaaatttaaaataaaaaattacttaaaaatttgattttacattcctcctattctcactttctggtgcccatacaacacataaattacattcttctctatgtttacctgcatctctagggaacaaagcccctttcacttgttctgttactatagaatgttctacaataccccaataaagattcattcatttgttcatttacaaatatctattaagcacctactgtgtgtcaagcagtatgctaaatcttaagcatgaaacaaaagaaagataaaagtatctgattcagggactggttgttctgttgttctgggttttttttttttttttttggaagcttgttgaaaatctgtggcatcatacaaaacaaaaaagaatgcaaaactggtgccttaaatagaaatgtattaataatgagtgttagagctaagagaaggcaaaatgtctacagaacacatgatttcaattaacaacagtgagtaaacgaatgatctggaaaaaaattatgatcgggcccatgatttttttttgtcgttttttaaaaattttgtttgtttttctcatactcatattattctaaggcccattgattttagaaagaaaatctgttttataaacttagcatattaaaagcaaatgcatagctccattttcttagaaatgcgtgaatacataaacatgttttactgagagtaggacttaatttatatgtattaaactgtcagaatatacaagttctttgtggtcagtaattctttcattcatttaacaaatatttcttttgctaccatggatcaatcagtcattgttataagcattgggaattaagagtcctgccctcaagtttacatttaggtgagaggacaatgaaaacaaataggtgaacaaatataccagataactagaaattgcaatatgtgccatgaagaaaacaaacgaggtttgtgtgtctgtaaggaggtactttgcataaggtgatcagagggagtcaatcatgatgataggggaggaatgtcagacagaaacagaatatttacctatcgtttccagaagatagtgctgcctggaaaatagcagtatacatttatctaaattacagatttgcaaaatacagccagtggtctattttcataaagttttagaaccatttttgtaaataaagtattttgaaacacagccatacatattctttaacatatttcctatagtcgtcttcatactgcaatagcagagttttatagttgcaacaaagaccctatgggccacaaagctgaaaatatttaccatcttgccctttatagaaaaagtttgccgactctggctctaaattccttatttgcataatcataacttttttgtattttttattttgttgtttttagacttgtaagttcatatcaacaatttatagaaactctgttaaaatatacctagtgaagacagctgacatttattgggtgagattatgttccaggcactcaagtactttgcatgaaatgcattacaggtaatgcccagaacagtcctatgtggtaggtgctattatcactcaagcttatagatgaggaaaatgagaacacagaggttaagtaactcacacagcaagtaaatggtggagccaagaatcaaaaccagacaacctggccatagcactattctaaactgcctctgtcatttaatattctgtaacctcaccaccataatagatctgccgcttaatactgcctatctgttcctaatttgcaaaaggaagaagcatcgtgcaccatcttgcaccaaagaatttagaatttgtgttggagccaaattttactgttattccttgcttagcatttagaatatgaagaaggtttccaagtaatttcctctcaagcttcattaagaagctttgggtagataattggtgctttcaagaatggtcctgctcacactggcaatcaagactgtttctttagatatttagaagtgctcattattaaattcactagataattctgcagccttctctcttgttgtggctataagatgtgccattagagcaaatattgccttcccctttctccccatttcctaaaaccccaacataacttcagcatccccatctaaaatcgccaggtgattccacaaaaatcccggatatgcttggcacaacctgtgcaaacccacctgaaaagtccatttcagaaagccccaattctgtgatattcagttcaacctaggcatcaaacacttagccctagccctgatactatatatctgctaatttctttggaaggtatctatatttctaggttttttgtttggccaacctattcacttctgaataggctgaagagatttgccgaaggttggtgtaagcttccaaaagtcacttgtacttaaacattttcacatccagtgaaaaaattaaacattcgagaattgccattttttccaactctgagtgtgggttatgaatagctattgagttatgacatggtgctgagcagtacctaatcacacaggtgggcaggatccctgccctcacagagtggaggagacgggaaccagttaagagaaaatgaacacgcaatgtaacaagtgctgtcatgaatgcaggatgatagagtggtccaggggcatggcatccaatgaggagttgggggtgggagggcatagtccagaaaggctccctaaagcatagacttagaaggtaaaattgactagacttagagtgtggggagggggaggattggaaatcaatgattcaaggatgacatctggtttcatcatttacatttggttgaactattagccttttttcagtatatgtttctagacacacctgaagttgatacctgtctgttcaaatggccacacattctttcattcttcatggttgcttttttgtttcaagatagcaagaaaaccaatctttcctcattttgccagtaaccggctgtgggattttggacaaactactttgctcagcctcagtcttttcatctccatagggatattgaacaaaattatgtctgtggttctctcctcatctgaaattctaccttttaaaccccttccatgtcatagtgctttcatgacccccatagattcatgcggcatttcccaattctgagccttaggatagtgtgtctgttagaattgtgttacactttgtgtcagttaccaaacctaattaaccaaggacttaagcacattaggggtttgtttttttttttcaggtattaaggaatccagatgtaagcaatacatgaatgatgaaatagccaaacaacagtgttggggacccagactccttctatctttgttctcagtcatccctgttcccaagatagctgccccatctccagcttcaagtctgtactccaggcaagaagaaagatagcaaaaaaggcaaaatcaagggccagctgaattggcttagtttgaaagagctttcccagaagttcttagtggaatttatttaaatcttattggccagaactatgtcataggccacccctagatgtaggaggggaggctggaagatgttcttttttttcagttgggtacattaatatactaagcaaaatgagggttgtactgataaagaagaaacagagaagggatgttagacaggcaactggcattgtttactgaagtttattcagatgtaacattcaaaatatttaaaacagttctggcatagccactgaccaatcagaacagaaactggccagcatgttatagccagctgaatggcagccctgatgtttttctgctttgcattatagttactgtatacagttgtcatctctcctccccccacatcataaggcctaagtccatcaaggacaggattacactttgcatgtgttctttacagctctcaagaaagattcacacagagtaagtgttcacttttgtgaaagagaattaattgttgaattattcaaattgtaatccagggatgagacaacccaaccaagaagtgttcaaattattacctagtctattttctcaggaatgaatgatttatgtgattggtggctgtatcttcccaaattccacaattgattataaacctggccaatacagatggactttgaaggttgctcaaatctcttacagctactcaaaaggattattacagactagaaaaagtattgcctgcagtgaaaagcttcaggaataatagagttcagtagccctttttcttcatttattacattgaataaaactaataaggagccaccccaataatcaaatcaagtcagttccttaaagacttgcatctggttcttccagcctataatgaacataatagcgcatcatttcttttcactcagatcttgagtaatcataatgctcagaagttgggatggagcattatagttaatttaattttcttaaaagcttgaggtcaattggaaaattcatgtgttaattctaattctttaaaaaattacatttttaatgtttgtggtttaattttcaccaatgtaattacttcaaagacttttattttctctactttgctcatttctaaatgatattttaacatctatattttttatttgctctaattctccagtttattctccattccatgcaaatcttgaattgagatgcaagtttatcctaaattatttgaagaactgataatgggctaccaagaaaaaatacatacatgcaatatccaatttccaaactggctttggtaagacatatctttttgagaaatcatttccattaaaacacctctcagatgcaaattattctatggagtaataaaagttagactataatgggcattttgtttcattactttatctttaaccttttagtttggttccttttaatatttgaagtatgtgcttacatctgtcgtcttctaggaaaatccctatttttatgtttgtatctggattattttatagtatgtggggttttttctttctaccacacatcttcaattctaagaggaacttttttctttgtttataattgttgaccaggattcattttattattagcacttgttgaaaattgtagggctggcctggtgcagtagctcacgcctgtaatcccagcactttgggaggctgaggtcaggagtttgagaccagccctggccaacatggtgaaaccctgtctctactaaaaatacaaaaattagctgggtgtggtggcgcacgactgtaatcccagctactcaggaggctgaggcaggagaatcacttgaacccaggaggcagaggttgcaaagagccgacatcgcaccaccgcactccagcctggatgacagagtgagactccatctcaaaaaataaaaagaaaataaaattatagggctaatatgtttattcaaacctcctatagctcaactgcctacaaaatttaccttttaactgcatggaaaatattccctctcccatatcaaatttcaaaaagctatgtatttttttctttccttattttttgtaccttttgaccaatatctgtcctttctcctacccctcagtccctgacaagaactttttaaatacattttattatctttgaaattggaatacatcttataattttgggcatatcatgatttaactggaagattttttttcttggtagtaaataaagtaatggcagcagataaaacaattgatagcttcttagatgcattgaaataaagtaatctccaacagtgacagtgtcctttgaagaatttctgaatgatccagaaacctgctgtgaaccatgtattgtttttgactggtgccctattgtatcctcaccaaaatgaagtttaaatctttgaaactggaaaataagacagaataagtatatagatattcttccttttgattctctacacagggtgtttttctcaatcacacagttgaatctcactggcttgtgcctttcacatgactaatgaaaccaaaatgtgcatcattttgaagcatgtcctgttttccataaattccaatctctccacagcaattccatcacaaaacagcaaacaaatcaaaaaataaaaaacttcctgactgcccatctcctcaatgaaaatgttgtggttttaccatgatgacattttctttaattgtggtaaaatacacataacatagtatttactgtcttaactattcttaagtgtacagttcagcagtgttaagtatatcggattgttttgcaaccatctccagaaatcttttcatcttgcaaaactgaaacttccaaagtatcttttaaaaggccattcttactgaagaattctcgcatagaattgaaatagctcatctctagctcttagctatgcagcccttctaatttttgtcgaacattttcaaatagctctaagcctcaagcctgagatttagccctaacccaggccagactggaccactaaatttttaaacattttttccaaactatactctctttaagtatgtgtgtataagaacaaatggctatttcagtctataaaatgaaattaatgaaattaaacattttaatattttaaccctttattttgctttgagatggagtctcgctctgtcatccaggctggagtgcaatggcgccatctctgcttactgcaacctctgcttcccgggttcaagcgaatctgcttcccgagttcaagcgattctcctgcctcagcctcgtgaatattttaacacgttaatatttaagaatgtttcctcctggttgattcccactaaaatgcatgtgtccttccattaaaagagcccaagcactacagtgtcatttccatatctcttttcttgtcttgccttgttatttaatgactgaatgcttctttgacatcagagaataacctttcatgatatgcactcaaatgtgtagatgaatcagataaccatatccttgttaaaggagattattctgaaatatatgaaccaatgggaagacagaatttgtaagacaggaactttcttactggatttctaggaacgctggacctttctggtgatgcctccagcatgtccacaaaggacaggaggccaaatggctgaaactcactgcatgctccttctggtaccctttcagctcctcttatctcttttctgtttggagatcctccatgagattttctataaggtaatgaaagttatgctgcttaaaaaaaagtcttaaaaagtggagaaagttcagacttatttaaacagacctggattcaaactacagtccagtcacttacaacccatgtggtctttagaccaatccctaaccttctccaagccttgttttctttgtgagtagaatgaggatcgtaatgtctattgttatctctgagtcgctgtaaggattaaaaagtagagtgttattgcatgcgtcctcaccctcagtaaacgtttgctgatagtattctgcattagaaattgaagagtaccagacattattgaagcatcactttttctttttttctgtctccttctactcatctgcctctgttagaggagctcaggaaaaagtattagctaggcttttttttttttctttttctttctttctggaaggcaatagttctcaaagtgtggactcgataccagcaacataaacatcgagtgggaatttaatagaaatgccaaatgtcagaccccaacccagaactgtgaatcagaaactgggggtggagcttagcaatctatgtttcaagccttctaggtgattctgatgaagtttgagaaccactgtaaaaagtagagattcacgtgggctagccagctaaagtgggagccggtgaggttgagggtgggcggaggtagtcagtagcagagacaggaaacgaataggaactgggcctctcaaggaagggaaaccagatctgaggacctctgcagctgcagttgatgagtcttcaccctgatgctgcctctcccatgcatgactcagtcaacttctagggcagtgattctctcctgggcaattttgcctcccaggggaatttggcaatgtctggagacactttttattgtcatgactggggagttgctactggcatctggtgagtagactccatggatgctgctaggcaccctacagtacacaggacagcccctatgacaaaatattatccagtccaaaatgtccacagtgctgaggctgaggaagcctcttctagagattgtcctcccaagctgctcgtctctttttccttcaccaactaaggctttaccttgtacctaagaaattcaattggcttttttgaaccttatatgggttcatacatgggcctcagagagtccacaaacttgcacaattctgttattgtgtatgtatttattctgcctgttggggaagggagctttcatcaaattctcaaaggttgtattctatgttcattctgcgtatgatttccctacctcacattttctgctcattcatcacttctctttgccacactgccgtttttctacttcataacttctcagctgcttctcacattgctgctttcttatcgtggccatatttcccagttcgaattccgaaggtaaggaatctgattatcctgctctcccctattcggacaaagcttttcccaccagacaacctcataggcccctggccttcccacaccacagctgccctgggttctggtcaggtcctccatgggatgaggaaggccagtagggagtcaatgtcacccagaacaaaacatggctgcccaaggcaggctccctcaggacgggcactggctgaggcaggcatcgtgattgccgcgtctaacaaagatggtcagaaaaccccggggttaggttctggctagagaagccacaaagcacctggaaagacaggaagatactggagtcagtctgaaactccagggtgtggcaaacacgtgcagaccctcagaagcctaagaggaggttttgcagaaccacgaggaaaaaataactcagggacgagaaataagggtcaggactcaaagcagtggacataatcaggacagaacaggccgaagtgcagacacaaaacagatcaataaaacccaacagctcagcaaaggtgaggcagctgtgtctccctctggctgccttttctcccctcctctctcaccagaagccaacgcgtacacgctgagtggagaggccgcgaggacaagacagtgggacatgcgtgtgctggggaagtcgagaagcaggacaggaggcaggtctgagagatctggtttgtgtcttgtgccctggttctctctgcattccttctctgtctctttttcccttcctcatgccttttccttagctgatttccctaggacagaattattttctttttcggactgaatggtaaagaagtatttgtttcctaagtcttcatttcaaaagcaacaggatagaactctctaagaaaaaaaaaaaacacaaatctctaaatgacattaaattacatttttatttatgtagccttgaatggattgttctactttcagtcagtagatttaaaaggggaaaaaaaacatgttcctcagtccaatgttatagatggcttagatgactgggctgcgttacaccagcaccaggaaatatctagagcagtggttctcaaactttgttccacattagaattttaaccctcaggcggcaccccacgccattaaatcagaacatctagggatgggagccaaacagccgtagtttttaaagtttctcagatgattccaatgtgcatcactggggactcactgtctaggaggtgattttaataaagccctgatccttgcttgctttcttgccactttacttttcctccagtagaatgtaacaaaagacaccttttatttttcagttaattaaattaaatcccagttcattgaggttgtgctctaatttcatgccagaaggcaaccagccgggtagttgcttacttcagtcaaaacaacagaccagcattttggcatcgtgtagtcaagcaatgtttttatccactgatgagtggttgttagtttaatcttcaactttgtaacttggtgtttaaatttatccaaacacaactttggaccctggagatatccggacttatttactgcccaccaaccccctcccccactccccgcccttattcaccagagtgaccagaaagcaatatgatcttcacagcgccagatcttgctgtgataatccgaggaaagaggagccatcaagccactcaagcaacatctcagctgctcagtaaatctttcaagagctcacccaagtcccaatctcagcttcctgatttcttttcctctttatatgtgaagggttttgttgtttgttgtttattttttttattttcataggtttttggggaacagatggtgtttgattacctaagttctttagtggtgatttgtgagattttggtgcacccatcacccgagcagtatacattaaacccaatttgtagtcttttatccctcacccccttcccaacctttccccaagtccccagagtccattgtatcattcttatgcctttgcatcctcatcgtttagctcccacttatgagtgagagcatacaatgtttggttttccatttgttgttcattttttaataaacatggttgaaaagactaggctatagtaggtcagtagggcctgtttctgagtgtggtctgttttgccagcacattctcatgaccacttggcaaaaatgagactgtgacatttttttgctcccaacagatgtatttttggtagcccacaggttcttcatttgtttgtttacagtctttaaggagagaaaacatgctgtgaggaagggatcagattgaaaactgcttaatctgatgggaaaagcctgaaacacaacttattgatggtcttcaaaactatgacaggttagaaggaagaacattcaagctagttggtctctatttccatggaggaagtgagcttaaagtgcagttaattgggagtatagtgagccagagacaataactttggaattaaataacaaatttggctgctaagaaagtctatggcatctccattcctaaagaatcagtttgctgtggaatgggagtcagaaatgggtgggttacaattctgctttggtctctgactcaccaggtgttacatggcttttcagggcctgtgttagtcaacattccccagagaagcagaaccaatgggatatatataggtatacatgagaggagatttattatggaaattggctcacacgattatggaggcaagaagtcctattatgtgccgtctgcaagctggagccccaggaaagccagtggtgtaattcagtcttattctgaaggcctgagaaccaggagatctgatagtgtagctcccactccacggccaaagcctgagaacaagagagaggcctggtataagtctgagagtctaaagccctaagaaccaggggtctgaagtccaagggcaggaatagagggatgtcccagctcaaggaaggaaaattttcaccccttccatgtttttgttctattcaggcccacagtagattagataaagcccacccacattggtgagggtggacattctttactcagtctatggattcaataccaagtgtactgggtgtttctcccagaagcaccctcagagacacatcagaaataatattttatcagctatctgggcatcccttaacccagtcaagttgacacaaaattagccatcacagggtgtcagcatcctcatctatcaaatgagaagttgagctggataatccccaaagtccctcattgcatacgaatgtcctatgatatttaacaataggacatgtagccttctgccttgagaaatttaggtactaacagaaattgtttccctgaggtcccttcaacttcaacaatttagagtaattcaccaatgtgtttcctattttgaataggactaatgtgtttcctattttgaattgcaaaaaatataaacatatccatatttgataccaagaaattagtaattctgttggatgtgaaaagaacacgggttacataagaatatggtcataattgctagagatatatactgaaataggtaggagtaaaataacatgatgtctgggatttttttaaataaaataatatatatccagatttcacaagatttcctttgggctggaaaggtttctgaatatagtgcctgtgttctagaaagaggggtcaggagcctagagtatgcagatgttgatggtattgagtgttctgtacacagaaccaagagactagagactttagagaccacaaaatgcttttcctaaagacctagaacatgaaggtttaatttatttccctttttctcctccatgtgttttggataggttggtaagtggaaatcaattacccctgaataaaatagaaaccctgagagagataagtgacttttctggggatacatgctaatgacaacatcaaagccagagtgaggattgaagggtgaggtactatgactacctccctctactcctccttcccctcctgctggggaaatgccaaaggtataagtatccttttggcaccatttgtcctccagggtttctgtgtctgtcctgtatctccttattcattcttaaaactctttctagtggtcagagctctcctttaaagaaagaataacaagacatcatagcagtgaactcagagcactatcactggcttttcacaggacatgagcaactttctcactggaggggtcagggatgcttgcatggtaggtgctcctgactgtgataacttcacttgagcctaccctgagaatgaccctgtgtggcagatgcacccaaatatatgttcagagttccaagctaaggaattggaagtggccatcccagagattcattccttatctatgaggaacatctgaaccccagcccgtcccagggaatgtgggccatacaggggatcagcatcctttgtttggggttaaatgaaggttgccaggctgaggttgctagggggagggtgttaagtgaaaatgttttataaactgcatgccttttgccagcgattgtggttcttcttaccagcccactgccactggaccagcagttctcctgtccagcccgccaccactagaccctctcccctgtatgtaaacccccagtaaaaccccagtgtctcattttctagctctggatctcttcttcagcctcttgaacctagtgccatcccctttggagttgatagggattcagcacatcactgctacactagaataaaacatgtgctgtgtccacattaggccaacaaaatcccataccatccaacttttttcactgattaaaaatactattaaattttaaattggttcatataagaagttgcagaaaaggtgtttgtaggcaaatccagctgactcacatataaatcatctgtattagtttattagggctgacataacaaagcaccacaactagatggcttacaacaacaaaaatgtattttccgacacttctagaggcaacaagtgtggaatcaaggtttcagcagggccatgctccctctgagatgctgggtggagtcctcccttgcctcaccctagcctcttgtggtggcagcactccttggcattccttggcttgtagctgcatcactccgatctctgccgctgttttccaaggtgtcctccccgtgtgtctcttctctgtcttataaaaacatccgtcctattggattaagggcccaccccactccattattacttcatcttaaccaattacatttgcaaggaccctatttccaaatgaggtcacattctaaggtactggaggacttcagcgtctctttcgggaggatgcaattcaacccataacaccatccaaacaaatgacattatgagaaggtttccatttttgtcctctgttgtggttagattcctgattttacataatttagagctaaaaatttacttcctgtctgaaaagtgatttttgacaaggattgagatcacaactcgagttctgtggccattgcttgccctttcagaatcacttgtcccatcctgtgtgccatgttccaaagaagccaggtgagcagatgctggcgacacagggatgacagcatagactacagctttaagtgaaagggactcatgactcaaccctgtagcttgcccttgctatggttgccccacccctcccaactccttattcctcctgctttgctgaaaccacagctgccttgaatcgagccattttgattctgccgcaaatgagctgtaaaccaaatcaagccacatcaaacaaatccaaccaccatcaaaagcaagttagtcaatttttgttttctttgcaatggggaggggtcataaaagccttgtatatcccagggcaaatattaatctgtctgaagagtcagcttgccaacgggtaatcagcaaacaggttggtgctcatgagagctgcacagactggtagttgaggatattcggtgccaggagcaaaccccagcaggcacccttggtaaatctggcaggctctgtgacttcaccctctgcattcggaagcaagcattcaaactttgacaggcttgcgacatgcccagggtaagtcacctggcttcttggattctggacagatatccttgtgccacaagctcacttctctttctctgcttcaggactaggtccttcaaggggatagcagagaaagcatgtttgcagaatccatgccttgtgcccactcccaccctactgcttggcacttttagggaaagtgggaaggagtaaagttactctgtcactggcagaggagggacagtaaagggaagaagaaaatgggagaaatgagaaataggtacccaatgagtaaaaaaaaaaaaattgattacagtgcttaaaacctatcactacagtggtgatgtttctgaatgatagagagggtggatttggcaaagcttctggaatcttttcagacttgaggtccacctcctgtcttgagaccagttaagtttcaaccccacatttgctgtggttgatcccttgacctttgtgtaaatcctcccaactttgttaggccagaggaatgtggagtaagggttctgagttgtacagttccacagtgactcatctggccaataccttaaggatgcaggaaatctgagcagagaacaagactccctcaatatttagaaactggattgagatttcaatccaaaggatacaatttgcccatcaccttagttgcttgtacagtaaattgagcacgtcaataacactaagagaactttttctcttgatgcctaaatgccaatcacaatttttcttagttctctcaattggcatcctggttcctgtctcactcctactgtagtgcacacttacagaaatgaaagctgcctacataaccaccaccagcatccagaaaggagagaatttgacaccatctctttttatctccaccagtttctgctttttagtcattaacaaatggctctggttccctttgcagtgaagacccacagaggcagaagtccctgctctgagtcagttcagctctgattttgaacactgactgggtgctcagcagtaagggttgaaaggaaaaagagggaatacggggaaggaggcagagatggagacagatttacaggtcttgcctgagagttgtgcttgataagcagagagccaattatctctgcaactccaccttcccagcagtcaaatacttgatgggcaggttaaaaagtgaggaggtgaggacaagattaattatcaagtctcagaggaggtgaatgaaatgccttcttgttcattgctatttattcaaaaagagctgctgaacatgaaagaatattatcatttttgcaaataattagaggaaataataggcttgtattttttaagcagctttattgtgatatactttatgttccacaaagttcacttgtttaaagtacagccagccctttgtattcgcaagttttacatccatgaattcaaccaatcaaggataaaacatattctgaaaaaaaatgataatacaataaaaataatacaaaatgtaaaacaatatagtgtaacaaatattcacttgctatttacatagtattcgcattgtattcagtattataagtaacctagagatgatttaaagtatatgggaggatgtgaataggtcttatgtaaatactacaacgtcttgtatcaaagacttgcgcatctgtggatctggtattctagtattcattagatccacagatgcgcaagtccttgatagaagatgctatagtatttgcatataaccaatttgtatgtggaaccaatcccccatgaatactgagggacaactgtatacaattcaatggattttagtatacagatgctcctcaacttacagtggggttagatcccaacaaactcattgcaagttgaaagttaaaaatattgtttaagtcaaaaggatgttttcaacttatgatattttcagcgtatagtttatctggacctaacctcatcaagaagcaggttgaatgcctatctcttttgcaccctcataaagtcaaggaatcatggaactatagtaagttggagaccatctgtatttacagttgtgcaaccatcactataatctaattttagaacatttcgtcaccccaagaagtacatgacagcaatcactctccactcctttttcttcctgatccccagcccctggcaaccactcatccaccttctgtttccatagattagctttctagacatttcacgtaaatggaatcatgctatctggggtctttcgtgcctggcttctttcacttacgatattgttttctgaggtttattcgtgttgtagcatgtatcagtgcttcctttttttctatggctgaataaaattccactgtagggttataccacatttgtatatccattcatcagttgatggacaacacactagtattttaactaaagagcaaagtgccatgatctctttaatctgaattgtacacctttttagctgtacatgagttactatgacagtttctgatcttaatatcttagatttaagcgtatttagtattgataataaaaatgacttctgtttaagtttgtggagagttggggtttgcaggatgatgtaatggtgatagcacaataatgtcatgatatttacatctgtgtttttcaactatcttaatagagtgggtctgtatttaagactccattcctcccttctaataaaataacatttgaatgactggagttttcttaatggcatgcacatggaacactgcacctgcagttgtgtgttcagctgacaagttcacagctgagtgtgaagccaagctacagcaggtcttccaggggtctacttgccacgtggtcctgtctgttggcatcagatttgcccttcacagcttctggcttaagtatgaatgagaaggcatgaaaaagaggagggactgggagcaaggagttctgcaggtcttagaatcctccctgggatacatatttaggcagttcttactccaggtggcaaaaccctgcacagccattcttcttacatgaggagtagaggccgactgaaggctctacgatcctggcatggccatctcctatctttgggacattgagccagtatttagcccatctctttctcatcagcaagtgaagataataatggttcttatttcctagagatgttttgaggattcccataattcctggcacgtaccagatgtccaatcaatgttagctgttaataatcattagcatatattaattacttgctatttcctagatactgtgtacattcacaatcatccaaaaaggtagcaaaaggtagcaatagatatttccactttacaggtgaagaaataagactcaaggaacttacatgccttgctcaaggtcacaagactagatagtggcacaagtcgtatttagatcccttttggtccgattcagaatcctatacacatccagtgaaccatgctgcctatatgtaatgaatcgggtgggccaatattcacacacagtaacacaaagaaaaaaaatcctccaattttttaaaattaaaatgaatgattgatgcaattggactactttggaaaataatgtcaccaaaaccgatgagggggaaataaaagtgagaacctgggatgaagcaattgggacaaatttgggccttaaagaatctcaaagcacattatttgctcaatgctataatcttcccagctctggggagccagatcccctggcttatggagaccaaaagaaactacacatggcactctcgggctaaaaaacagtacatggactcatttccatcagctagagatgagtctatttgcccatgctaatatttcagttctcaacttaatagcttaagatgttcccattatcaacatcacttacctacccacagcacttttaaattagccttgggaaaaatgagtaaacagaagcacagtttatcattctgccaagtgcagctacccctgaagaaggcagctttggatagcaaaacagacaactagattgaaaaacagaagtgtcagccttgacacatgctactaatttgctgcttcgtaagggtcatttgctgtgttgcccaagagtgagggagaaaacagttcaaaggtcaaggacaaatggcatttagatgttccccaaccaggctgacataattggaaaactaaaacccatcgcctgctaacattcccctctcaacagtcttcctgattatgcagtgtaaaataggaacaattttggctactgatcttaaataatcctaagccctggatactaagaccaggaaatatgtattctcttatacttttagatgttctcaattgaaattaacatgaacatagcaattttccactttaattaaaagagtgtgttctttttccactcatggtattagtggcttcaaatgcttaaagaacctttacagaaaaccccttatggggattaagagatcaggacaaagataacattttaagaatgttcttaatattgcaatgaattgggaattattttttaaaccatttcctttagaagtctaaacagtgtcttttcatcactcggaggtattttttaatcactagttcccagttcactttaaattattagtgtagccctagcttgtaaatgcccctcaccatcagggaaagatggatttacactcatgacctctgaactaaactaagcagaaagtcatttcgttcaggtccactgctggtggccacctcatccccatgtccaacccatcattgtcccaatcaagatgatcgttggccaatttctacagactcacattcaggccaaagttactcactggactggaacaaccacctgtgtttcagtgatgctgatttggtcctctcatgcttgtaaaatccagctctaaactttactgttgcttgctggtcaatcaaggagacttggactttgcttctttttaaattatcagtagtgttatttatttacctccaaaaggattctaagtaacccactctagatatagatctgctaataaccagtactgtggccttggcaggttataacaataataaaacttctaacttttcagagtgtttcactgttacaaagcacttccatacaccttctcttgttaaagttattaccctcagagaacaccaattgactgatacacttctgataaagatagcagatgaaaaacattttggaaaataagggctctggacaaattcaaaggtaaccctgttaatctattgactggtgggcctagaatttcagggtgttgatccaactctaacttcaattctggctcccagagaagtctgccatcatggttatttgtcaagaacgagaggtcagaaatgccaaaaataggagttagggtgagtattctgtcaaaaattcgtacaaggaacttcttttataaaataaataaattaaggaatttggcctggatgtcagtgcctgcaaaagggacttcaatattccccagtagattactataaggatatctaaactctggactaggggttatagactacagataaaactgtaagcctcctgcctcctacagtcatagcatttcggagttgaaagtcccttttctggtcttgtagccctgatccaagttgctaacccctctaggattttacgttgtctcagcataagcatgcaccatgaggaggagctcacctcctaccagagtggcccatttcatccttggccgtagcaatctattgactggtgggccttaaaattaaaaagctactttgccttgtaatatgacccatttgttttagctctgcccagccatgggcaatcggaatgtccggtaaagaactcctctaccattttactgaacccaaatttgccttaatgtaatttccaccagttggaaggtctctcttcttgtgcctttggatacatttttttgatgactatagcagccctgaatgatttcagagacagagcacaaagctcctgagagctagtacattgtccttcccagtcttaacttctccttgtcttctatatcatctatatctttcccttttcctctgacatcttcccccagctctgttataattctttcagaaattaaacacaaattcctacatggaaggcagaggaattcagtgaaaagagcagaggaacttggtccaatccctgacaagtttccacgtttaaagcctcataaatactatgatttccctgatgggggtgggagggtagaatgacagactataagtgagtatttattataagcgtcaatgtactataaagctactgaatactttaacagtaaattctaaaagacctcaagcagcttagctccttgttttacatcagaacacattaaagagagaagcagcctgacttttccaaggaccacgggaccagttagagttagaaacagaacttagattttctgactcaaaatcccttgctccctccactgtctctctgttaaacaatgaaatcaataacatcatccaggcaaaggccctagaatagcacccaacatgtattaggtgcccaattattataggctgaataaatatgtgagtggacaaatcagtacatgaataactaggactcattttcaatgatgacattatacaagttccctccaaatgtcacttatgtttttagtcattctttaattagctccctattaagaagcttggttctcaaagtgtacttatgaagattaaatgaaataaagcattaaagtgtttagaaacaatgtctggcagccaataaatgttaactaattgctgtctttctgttttttagccatttttaaaagtaagattatgctgatgctgtcaggagtctctactctgaaaatcactttacaatccactaacgaaaggaattctggaattgcaaaaggattactactatttgtcaattcctatccttcacctgtaactaggccacccacacctaccccttgtagttggcacccatcaagacacaaacaaaatattggattctttcgcttcctcatctgggcttgtgtttactccacccctgacctttgggcactgtctcccattcccagtcaacacttgccaattggacctgacagttgacttgactttaccctatttatcttgctccctctgtctccatctcaatctcaatcaagattttgtaattcccctttggttcctccactctcagccaccctggtacctctactcctaaacaaggcccatgcctttgactcaagtggatgtgcttgcttctgctcaagttcagcctgccccaaaagagtgattcccaagtgctttattggataaacttccttttcattcaagagctccacatgcatgtctataaattgccatatgtaatctctatcaattgccagaaatcttgcagatttctttctgaatctgagtttatctgacaatttgtcaggactaaagactaagactaaccttgggctaatgtcagtaaacaagaaagagctcaggaacagaaaaccaaacaccgcatgttctcacttataagtgggagctgaacgatgagaacacatggacacatagggcaggaggttgggggaacaacacatattggggcctatcagggcgtggggagggagagcatcgggaagaatagctaatggatgttgggcttaatacctgggtgatgggttgatctgtgcgcaaaccaccatggcacatgtttacctatgtaacaaacctgcacaccctgagcatgtaccccaggacttaaaagttgaagaaaaaaaaacaagaaagaacttcagtaaattcatcaattaggtttatacctgtggttctggtgtggacaagaagtatttattatctttttaatctccatgtcttgctaaattcatcaattaggatgatatctgtgattctagtgtgacaagaaatatttattgtctttttaatctcctcatgtcttgtgatgaattaccatgtattattttctcatttgttaattgtgtatcaactcccactttattccacccagaatgtaagtttcttcagagcatggacttgacctgtttatatccacagctctatcatcagcacctaaaatactatttggcaaatagtaggcaaccaattgttattggttgaatactgagtgaatgaaagaataaatgaatgacccagaagcagaatggaattgtggttggagcacagcctttggcatcaaagagatctcggttcaagttttggatatgcaacttcttagctatgagtcttctctgaatttcagtttcttcatcaataaagtaggggtaataatagtgcctacctcatagattttggggagcattaaataagataatgcctgtaaggttcttagcatgatagctggcatattttaagaacttagtaaatgttgtgtattattttcggtgaaagtcctcaaatgttgaagcttatcagaggtaattgaattatttaatatggctggtagtgatgattgtactaaagacaaattagtacaattagtctgtcagcaagatttgatttaaagagtcaggctgacaaaaaaaatgtattggtcacacccaccatatttaaagcactatactaggctttcaggagggggtgggatgcaaggatggatatgacacagccccttccctctaggaacgtagaactgagaagatttactatgtgtgcactgtaccatgctgaagatacagaaatgtgaggcagtgttacctcccacatcatccaacttactctccatgctctgcagaaaattcttctaaaacactcagcctttgctttgaacccctataatgacaagaaactcactgacttatgaaacagatgattctctttgggaacagtagtcaccactagaatgatcttaaaattagcacaaatctacccccccatggtttttacacattgatcaaacttctgccttctgggcacctctagaataaattcattttgcactcttctatcagaggtcagcaaagtaatgcctgcaggccagatccagcctgtttatttatataaataaagttttattggaacacagccaagcttattcatgtacatgttgtctacggctgcttttgtactacagtaacagagtacttggaacatttcagcctacaaagctgaaaatatttactatttggctcttgaagaaaaactctctcaacttctgctttatgtgacagaatttggagataaacaacatgctttttcctaaagtgaggagcagggaaatgagcacagtactccaagtgggagctaatgtagaattcacagaactaagtagtactatcacctcccctgttctggatgccatacttcaaataatgtgaccagagatcaggttggtctttgactgacacacaatactcaagtatataaaagatgaaatctgtgagttatttcccccaggagcttctattaaattatgtctccccaccccataatggtatatcctcatgttgggaccccaccccataatggtatatcctcatgttaggaagtatatacaaaattttacacctttcttgcttgtccagagcaatcaggcacaatttagcacatattcaagggccatcttagggtcagacagaaaaaggatggcacgcgcagctaggattttgaagagaatgtagagactctttacatgcccaggggtagggttagaagaacaagggaatttgtcacccccctatctgcataaagaagagtggagagggaagaattttgccagggcccagtgatagctggagtcatgactgcttaactagtcttgtggtaaaagatacacaaccacggctagcaccactctctgaggcagtcagggagggagggaaatcgataccctgatatgcccatctccatgctctacccactgtgggtagaaccctacttgaagctggagggcacaggagtcagactcacagggcacagagcaggtaaagaatagacgtgggagccagggcagaggatgacaagggctaagtggtaagccaagcatttcctaaatgctgaatgaatagtagatgaatggaccaagtgggcccagggcctgtcactcaataagtgtttgttgaactgcagaagccatccctttatgcccgcctgccccgaagccctcactgctgctatctgctgttccagatgtcccacccccagcacagcccttgtcctggttctccactccctcgctgacccctcagtgtttctgccaagagtgtaaaaacagtctggatcttattttggagatgacagaacggagcaggatttgctctgaacagaacaggacaactctaatcaaagagagaactttaagttctaaaataattcttagaatctaaaatttttttaaacagaaaatttggtgtcactgcaccctatggagaaaaatgagtggctcctaagaaacgtgccccagacatctgtgtcagaggctctggatccaacagaccccttattatcaaatgccttggggctggctgtcttatgctcagatggcccttgtcacatggtagcctctgattgtaaagacttccaggctcttgattgatcgtgccaacagcagcaatgttgagaaagtggtgtgtgtgtgtgtgtgtgtgtgtgtgtgagagagagagagagaggttgtcaatggcatgagggtgctagtggccaaccacagcttcctgccagtcacctcctcctctgtccattgagtcagcatggaggatattcagcactggcttcctcaaggaataatcctgaagattctggattttgaagacttagaaaaagcattattttgtctgctactctggttagattatttgcctttgcttggaatgggcaagacaaaactggacattaaattatgaattgctgttcatatatatcgaagcccattttaaaaagtagctgtaggttgggcatggtggttcacacctataatcccagcactttgggagtacgaggcaggcagatcattgacgccaggagtttgagaccagcctggccaacatggcaaaaccccatctctactaaaaatacaaaaacttcgccaggtgtaatgacatgtgcctgtagtcccagctacttggggcagggggcgggtgaaatgggagaatcacctgagcctggggaggttgaagttgcagtgagctgtgattgcgccgttgcactccagcctgggagacacagtaagaccctgtcaaaaaaaaaaaagatccatacctctaacagttgtcccttcatgcctccgagactcaggctagtcagtccccagagtctgaaagttcttatacaaaacccagaattccagttcatctataactatgtcagaatttgttaagaaatttcattaaagtctccaggaccaaattttatgaaatctaatcccaactaggataactggcaaaatttgagtaagctctatagattaggtaataatactgtgtcgatgttaattttcctacgttaattattgtactacatttatgtaggagaattgtccttgttcttaggaaaacacactgaaatatttaggggtaaacatgcatcatgactgtgactagttcacaaataattaggaagtaacttttatatacagagaagaaagattataaatcagatgtggtaaaatagtaacaattgaggtatgtgggtcgagggtatatgagattttttttttttttttactattttataacttttctgtaagattaaaattacttcaaaataaagctgccaaaaaacaaattccagaacactagagctgtctcatgcctatcactgaggggccaatgttcagccatgctacgtactgcagagtgagccagaaatggaatctcccgttttgtcatcttggagctaaaatgaatcatttcctctttcagctaaagaactctcctattcatggaggcgaacactgaggatgctttccacatgaaccctgaaggtaagggggacttgttctcatgcccctcggtcacaccacccatctgccccactgtccgtttcatccagggcaggggctcaactatcttggtttacagaatatcatctcaaaccagtcaatgtctacactggcacattctgctgtcttcaaaggctgtttcagtctccccagcctgtccagctcagaaaaactgatgttcatccttttctgtttttctcaaagaaaataccaaagcttttaatagctgatatctcctagtggtgcaatcatgagagatttttattttctccttgtagttttctgtaattgagagattatcgacaatgactatgttacttctataatcagagagagaaatattgtgcttgcttttattttcttaagcaactctacataaattcttgccacaactttctgggccccgtaatgttactgctgtgtctccttcctcccagccctcatggcaggactcatgtgtgacaggctctgggtcttctctcatctgccagtggcaaggaaaccctaggctgccaggactgcttagcaaatagatcatgaagtattacgactccattttacagatggagaaaccaagccccctgacttccctctgtctacactacaggcaaatgggatctggacccactgagatgagctcgacatgtacgactttgaggctgtactctctcattcagaggaagttaaggagccaggaagataggaaaacaatgaagttattggttgaagaaaatcctagacaaaattttcctgggacttcttggggccatctagggaaacttactagtcttcccacattgaaacatgatagccccttgagagccatcatgccgctttggtgtcaagttctgagcctgaacttgccctctgggccagggtttctcaaacaacagtgtaggcattctgggtcggatcgttttgggtggtggggctcctctgtgcatcatttgatgctcagcagcattcctggtgtctcccactaaataccagaaggacaccaccccaccccagctctaacaaccaatgacatctccagacagttccaaggaggacaaaactccccccaacagaagtaacaataaaataatgtttccaggctttgccaaatgtcttccaggtggggacaaaattatcctaccaaaaaccactgctttaagttgcctcagcccagcagaagcttttgtttttcatggaaatcgactgaaatttatagtgttcacaataacattagcaaatacttgcagaagaagtgtcatcagtcatcaaaacgctctgggtacaagagtgccccacagcataatagccctgcccaggagcatctggtaacattggaagtggtgaatcgacccattcagacttctctgtgctttctcccgtcttggcttctaccccttcatgccaaatgcctcatgctatttactggaaggaaaggcaaatgaaggagaacagggcaatgctgagtactgagtggacctttcctttaagagtttgaagaggtcagaaagcacccagtagtcagagctgtgttgcaaagctcccggaaaatttggccgctactttgtatttgtgtgtgtattcattattcatagacatgtattcatagacaacattattgctcaaaagatttgagacatattctccacttcactttatataattttaactttttacagcaaacaggtcaccactctaaagagtggcttaaccagaaatccttttttaaaaaaaattaaccaaatagtataaagtagataaggtggcagtagcagatttatctgtggtaccaattggcaaaccaaggccctaaaaggaaattccaaagccctagggtttgtacacacacttcctattcatctttaagtgcacctcatggaccttttattcctctgattgatcttccctgacccctgcacccagcctccatcatcctccaccctttcccaacctggtgtttggattacaaagatacttctgattccagtggctatctgtgaaatcacaggcaggaacttgaaagcagttgcatggtcatccaagagaaacagaaacacagctcagtttcagggtgaaaagaacatccagaaagcaatattcatagaagaattcagagggggggaccctccttaaaagaggggattaaaagttaagagtaaaattgcaattcctgtccaagacttgacccaaagtgccgcagtccattttgcagccttttatatgatgtctggtctctctaacttaattgttaactttccagtcctgtcccagtggtaatcatcactccctaacaatcactccctcgtgccccatacccacccagggtggaacaaactgtctttgcctggcataccagattcttttgcaagagccctggcatccttcaggctctgcccattccaaccctcccacctccagccctttcccaggcccccatccgcacacttctgcccttaactctctccagactgcaagaagccaagaggagattagaagcagcccagggtcctcgggaggatgtgtccacccataggctgtgttttgaagttcatttaaactctatacttataatatttttccccaccacttacctgttagagtttctcaaattcctatcatttgagtttctgctttgactaaattgtggcattactcaaaacctacacatgtacctaagggagaaaggccttaatttatagacagcaatttgtttatgagattgtcttgctggtgcttctctaagaagagagccttgggattgggacacaggacaaattaattttgattgcagtggagagactgaaacgattgggatattgagctctagacctgtactgtctgatacagtagctacttgtagcaatttaaatataaataaattgaaattaaatgatattaaaaatttcatgcctcagtcacattgagtacatttcaaatgtttgccagcctcatgtggcttgtggctaccaccactggacaaaggaaatccattggacatttctatcgtgattgaaagttctactgaataccatgtcttgagactgaggctggtacttccagcagagagttctggaaaagaggtgcagcccaacatcaccagctctgtgggcagggatagagaagagtagaaggaaccgaattccaaaagggaagggagccaaagctcaggcccagccctgagcaaacatgcatctgccgcacccaaactctttatgttaacaaatggaaagagaggagccactggggtcggctttgtagcccatttcctccattggatggcctctgagttctgtgggcttctgatgaagcaaaagaccccatcctgaatcctgaggcaagagggactcagagtttcactcacatacgggagccactgggctcccacacaaagggaaatctccaccctagtgacacaaggagccaggcagtctcccggagcccacttagagcaatgagtttccaagtcaaaagacatttcaaggaagaggagcatcttgtccatctgaaattaggcctccactcagaaaaatctgaggagcctggagggttccaaggagcaattgtaaccccaactgatgatggtggagcatttatcaagccttgccaatgacagtggttcacgcttcaatagcactttgcagccatgtggcatgcttgaacaaaaatatcatttatttcatcctcacaacagttgactgaggaaagcagggcacatgtgaccctctcgacactttacattaaaagatactcatgctcagaaagaggaaaagacatgccaaattcaatgtggctgatgaatgacaggaccagctctagaaaacaaccacctattctgtctctctcaagcgatggggttacttggtacctgtccaagtccctaaatgtgtcagctccaaagtgtgtgcctacccatggatcatgctgcaaagtcagttcacatccaactccaagctgacaaccgagcccttgaagacttctgctaggcctcaatgtcaagaacattcctaaaccaatcacaggcaaaaggcaagtgagatcaccatggttagcttagactgatacctcctcatcccctggggctagatgcctgatacctaacaaaactagatacctaacaaaaatgaaggcagaagtgggtgttggagaagcaaccagcagtgtctgccagacccagctatactcagggctatgataaagaagaggggctttctactcctccttctcccgaagcagcctccccaggcaacccctcctggcctcctaggccaggtcaaatctgcccgctatgggttctcatggtacctgcaggggtcctccttagcacttgcatcatttacattgaactgttttattagctcctctcttcaggagactggaagtactaggaggtttgtttcagcaaaacattgtattcttaggaccctacccctgcatcacagatgctcagttgatatttgttgaaggattaacagatgggtgggtggtagattgatgaatggatggatggatggatggatggatagataaatggatgggtggatagataggtgggtgggtggatggatggatggatggatggatggatggatggatggataggtgggtgggtgggtggatggatgggtggatggatggatggatggatggatggatggatggatggatggataaatgggtgggtaggttgatagatggatggaaaggtgggtgggtgggttaatggatggatggatgcatagatgggtgggtggatggatggatggatggatggataaatgggtgggtggataaatgggtgggtggttgatagatggatggaaagatgggtgggtaggttaatggatggatggatggatagatgggtgggtggatggagggatggatggatagatggatggataaatgggtgggtggataaatgggtgggcgggttgatggattgatggaaagatgggtgggtaggttgatggatggatgggtgggtggatggatgttccagccactacataggtcaactctacattttctcaaaatgcattgtaaagagctggatcgtggtttccctccctcttccccacaagttgctctgggagtatgaattgccccactcccagaccagcctcgctaagggccctgactattaatactctggttggacagatgacttttctgcaaagaaagggctcctgagggaagctgaataaaatggggaaaaaaagaatgaatataagccagtaagagagacaagcaattatcttgctagataaatagcccagatgttttgaatgaagcaagtctgaaagaccatattgttcatgagaggtgactaaatcaggtagacacaggctgtattggtacaagatggaccaaagtcatgagggagagagggactttgggactggtagtaatgtcaggaggtggtagggatgctcaaacccctggcaataggcaaagaagtggagttttcaccttgagcccagtgctttccctcccctagcccacctgcctttgaatttccacatcctcctgctttctcctctttctctaccctctttcccggtttaccactctttcaatttccggttcctcttgctttgcatgacaaggactagcagaagccccggggccagagtaaaacaagcacccagcttctcagagagagccctactgaatttattaaacgcctttttaataagatgacccagcccttctttgaggctctgaaaaatgagtttttcaatgaaattgccttttacccacttatcagaagtttaacaaaaaataatggccagccttaggtatttcaaataaccctaagacagacacagtgatggaattcagagaagtaggggaaaacaagtgggcaagccatgagtatcaaaagcattttaaatcattcaacacaggctaagaagcagggcacaggctcagccattcaccctgattaacacagggaggtcggctgtcagcaactgctgaaaattttgccacaaacatacaagtaatttctatcttctaacctagaggggagcttttccatgtatttgcaccactgaatgccaggttttcatttgggagttgttttgtggtgttaaaattttttgttgggattttcctcctcgattacgatagtaatagctttttattttattacaaaagtaatcacattttattttagaatcatcctcccagaaacaactactcccaatatatatttccagtctttcttctgtgcacatatagagatatgtatattagattgggatcaaaaacatctactttctgtattcaatttcttttttactttttccatgtttctatatcattggtttatcacattactttaaaggttaaataatatttcattatatgactgtaacacgatctaggtaaacaatcccttatggtttgatatttagatctcttccccatgattctgtttttataaataccaaaatgaaagcagaatattggattctagaagtaggagggtagggttctctttgtacagaattgtttttgtttctgttcatttgggataaatttctagaagcctattttgtgattcaaagtgtatctacattcttacggcttttaaaatatattaccctaaaaggatacaccaatttatattcaaaagataaaacatctgtcccacctctaccatctagcagccagaagtgtttacaaactcagtgttaccatccagaaatctcacggggttgggaagagaattaaataaaatattttatatgaaaatactttgaaaactaaaattgtattaaaatatatgttgccattattatcaatttttaaaccatccaagatggaaaaggcattacctccctcaatcacatattccaatgattaacagctctttagagcataaaattcttaccagttgccctctaaatacaactacaccacatatatttcatttattcagaaccatttattgaataccttctatgtttccagttttgcattaagcatgggagatatgaaagaaacacacacacacagcaatgagctactagcctgggatggggtgggggtacagagaaagataggtcaagattcattatcagtgccacggtaaggtcaggttctgggtgttttgtagacagggcatgatccagctttggagaacccagggatgtccatgcctgaaagagggtaatctgaaagttagcatgagaagcagcccagctttctgttgggggacaatgtggcaattcctattgtttctgaaacagtatggagaaatcacattttcctggcagctatattcctgcatagaaagacagcaatttttgtgggaaaaagacattaacaggccacatggtgggaaggctaagattccccatggggttgactttgaggaacactagatggttaccatgtctctagaaatgagcctgctcttggtgagtgagatatgcaagctgatgctgattgcaggattgcttgggactatagagagaattttattttattttagaggggattttagagcggtgtgaggaaagatgaaggggcaagatatgacaactgataggggaggaactttgagggcaaatacaaagatgcttaataaggaattttgccaagtgtctgctatgaaatgttctatagagcccctcactcctgtctactcacaatatccttgctcttatttttttttattatactttaagttttagggtacatgtgcacaacatgcaggtttgttacatatgtatacatgtgccatgttggtgtgctgcacccattaacccatcatttacattaggtatatctcctaatgctatcaccccctccccccatccaatgacaggccctggtgtgtgttgttccccaccctgtgtccaactgttctcattgttcaaatcccatctgtgagtgagaacatgcggtgtttggttttctgtccttgtgatagtttgctcagagtgatggtttccagcttcatccatgtccctacaaaggacatgaactcatccatttttatggctgcatagtattccatggtgtatatgtgccacattttcttaatccagtctatcactgatggacatttgggttggctccaagcctttgctattgtgaatagtgccgcaataaacatatgtgtgcatgtgtctttatagcagcatcatttataatcccttgggtatatatgcagtaatgggatggctgggtcaaacggtatttccagttctagatccttgaggaatcgccacgctgtcttccacaatggttgaactagtttacagtcccaccaatagtgtaaaagtgttcctatttctccacatcctctccagcacctgttgtttcctggctttttaatgattgccattctaacgggtgtgagatggtatctcattgtggttttgatttgcatttctctgatggccagtgatgatgagcattttttcatgtgtctgttggctgcataaatgtcttcttttgagaagtgtctgttcatatccttcaccaactttttgatggggttgtttgatttttttcttgtaaatttgtaagttctttgtagattctgaatattagccctttgtcagatgggtagattgtaaaaattttctcccattctgtaggttgccagttcgctctgatggtggtttcttttgctgggcagaagttctttagtttaattagatcccatttgtcaattttgtcttttgttgccgttgcttttggtgtgttagtcatgaagtccttgcccatgcctatatcctgaatggtattgcctagattttcttctagggtttttatggttttaggtctaacatttaagtctttaatccatcttgagttaatttttgtgtaaggtgtaaggaagggatccagtttcaactttctacatatggctagccagttttcccagcaccatttattaaatagagaatcctttccccatttcttgtttttgtcaggtttgtcaaagatcagatggttatagatgcgtggtattatttctgagggctctgttctgttccattggtctgtatttctgttttggtactagtaccatgctgttttggttactgtagccttgtagtatagtttgaagtcaggcagcatgatgcctccagctttgttcttttggcttaggattgtcttggcaatgtgggatctttttttggttccttatgaactttaaagtagttttttccaattctgtgaagaaagtcattggtagcttgatggggatggcattgaatctagaaattactttgggcagtatggccatttttatgatgttgattattcctatctatgagcatggcatgttcttccatttgtttatgtcctcttttatttcatggagcagtggtttgtagttctccttgaagatgtccttcacatcccttgtaagttggattcctagatattttattctctttgaagcaattgtgaatgggagttcactcatgatttggctttctgtttatctcttattggtgtataggaatgcttgtgatttttgcacattgattttgtatcctgagactttgctgaagttgcttatcagcttttgggctgagacgatggggttttctaaaggtgcaatcatgtcatctgcaaagagggacaatttgacttcctcttttcctaattgaataccctttatttctttctcctgcctgattgccctggccagaacttccaatactatgttgaataggagtggtgagagagggcatccctgtcttgtgccagttttcaaagggaatgcttccagtttttgcccatttagtatgatattggctgtgggtttgtcataaatagctcttctttttttgagatatgtttcatcaatacctagtttattgagagtttttagcatgaaggggtgttgaattttgttgacggcttttctgcatctattgagataatcatgtggtttttgttgttggttctgtttatatgctggattacgtttattgatttgtgtatgttggaccagccttgcatcccagggatgaagccaacttgattgtggtggataagctttttgatgtgctgctggattcagtttgccagtgttttattgaagatttttgcatcgatgttcatcaaggatattggtctaaaattctcttttttgtgtgtgtctctgccaggatttggtatcaggatgatgctggcctcatgaaatgagttagggaggattccctctttttctattgattggaatagtttagaaggaatggtatcagctcttctttgcacctctggtagactcggctgtgaatccgtctgctcctggactttttttgcttggtaggctattaattattgcctcgatttcagagcctgttattggtctattcagggattcgacttcttcctggttgagtcttgggagggtgtgtgttaccaggaatttatccatttcttctagattttctagtttatttgcatagaggtttttatagtattttctgatggtagtttgtatttctgtgggattggtggtgatatccctttatcattttttattgcatctatttgatttttccctcttttcttctttattagtcttgctagtggtctatcaattttgttgatcttttcagaaaaccagctcctagattcactaattttttgaagagctttttgtgtttctatctccttcagttctgctctgatcttagttatttcttgccttctgctagcttttgaatgtgtttgctcttgcttctctagttcttctaattgtgatgttagggtgtcgattttagatctttcctgctttctcttgtgggcatttagtgctataaatttccctctacacactgctttaaatgtgtcccagagattctggtatgtagtgtctttgttctcattggtttcaaagaacatctttctttctgccttcatttacttatttacccagtagtcattcaggagcaggttgttcagtttccatgtagttgtgtggttttgagtgagtttcttaatcctgggttctaatttgattgcactgtggtctgagagacagtttgttataatttctgttcttttacatttgctgaggagagctttacttccaactatgtggtcaattttggaataagtgcgatgtggtgctgagaagaatgtatattctgttgatttggggtggagagttctgtaaatgtctattaggtccacttggtgcagagctgagttcaagttctgaatatccttgttaactttctgtgtcatcgatctgtctaatgttgacaatggggtgttaaagtcccccattattattatgtgggagtataagtctccttgcaggtctctaaggacttgctttatgaatctgggtgctcctgtattgggtgcatgtatatttaggatagtagctcttcttgttgaattgatccctttaccattatgtaatggccttctttgtctcttttgatctttgttggtttcaagtctgttttctcagagagtaggattacaactcctgcttttctttgttttccatttgcttggtagatcttcctccatccctttattttgagcctatgtgtgtctctgcatgagaagtgggtctcctgaatacagcacactgatgggtcttgactctttatccaatttgccagcctgtgtcttttaattggagcatttagcccatttacatttaaggttaatattgttatgtgtgaatttggtcctgtcattatgatgctagctggttattttgcttattagttgatgcagtttcttcctagccttgatggtctttacaatttggcatgtttttgcagtggctggtaccagttgttccttcccatgtttagtgcttccttcaggagctcttgtaaggcaggcctggtggtgacaaaatctctcagcacttgcttgtctgtaaaggattttatttctccttcacttatgaagcttagtttggctggatatgaaattctgggtttaaaattcttttctttaagaatgttgaatattggcccccactctcttctggcttgcagagtttctgccaagagatccactgttagtctgatgggcttccctttgtgggtaacccaacctttctctctggctgcccgtaacattttttccttcatttcaactttggtgaatctgacaattatgtgtcttggagttgctcttctcgaggagtatctttgtggcgttctctgtatttcctgaatttgaatgttggcctgccttgctaggttggggaagtactcctggataatatcctgcagagtgttttccaacttggttccattctccttgttactttcaggtacaccaatcagacatagatttggtcttttcacatagtcccgtatttcttggaggctttgtttctttttactctttttttctctaaacttctcttctcacttcatttcattcatttgatcttcagtcactgataccctttcttccacttgatcaaatcagctactgaagcttgtgcatgcgtcatatagttctcgtgccatggttttcagcttcatcaggtcatttaaggtcttctctatacactgtttattctagttagccattcatctaatctttttcaaggtttttagcttctttgcgatgggtttgaacaccctcctttagctcagagaagtttgttattgccaatcatctgaagcctacttctgtcaactcgtcaacatcattctctgtccatctttgttccattgctggcgaggagctgcattcctttggaggagaagaggcactctgatttttagaattttcagcttttctgctctggtttctccccatctttgtggttttatctacctttggtctttgatgatggtgatgtacagatgcggttttggtgtgaatgtctttctgtttgttagtttttccttctaacagtcaggaccctcagctgcaggtctgttggagtttgctggaggtccactccagaacctgtttgcctgagtatcaccagcagaggctgcagaacagcaaatattgcagaacagcaaatgttgctgcctgagccttcctctggaaacttcgtctcagaggggcacctgcgtgtatgaggtgtcagtcggcccctactgggaagtgtctcctagttaggctactcgggggtcagggacccacttgaggaggcagtctgtctgttctccgatctcaaattccgcggtgggagaaccactactttcttcaaagctgtcagacaggtacatttaagtctgcagaagtttctgctgcctttttttccactatgccctgcccccagtggtggagtatccagagacaggcaggcgtccttgagctcagtgggctccacccagttcgagcttcctggcctctttgtttacctagtcaagcctcagcaatggtggacgccccttccccacccttgctgccaccttgcagttcgatctcagactgctgtgctagcagtgagcgaggctccgtgggcataggaccctccgagtcaggggcaggatataatctcctagtgtgccatttgctaagaccattggaaaagtgcagtattagagttggagtgtcccgattttccaggtactgtctgtcacggcttcccttggctagtaaagggaatttcccgaccccttacacttcccgggtgaggcgatgcacccccctacttccactgacactccgtgggctgcacccactgtccaacaagccccagtgagatgaacccggtacctcagttggaaatgcagaaatcacccgtcttctgcattgctcacgctgggagctgtggactggagctgttcctatttggccgtcttggaacccctatccttgctcttattaatacctcaagtgacatacagttcagtgtgccctacatgtggacggagggtgagagtgaaggctgccatttagaggcagccctgcctggttactcatccttcattctgtaaggagctaagtgctactgtgttctcagaacgtttgtgctaagcagggaacccctcttttgaactgtacgggatataaaagtgaacacaatctactgctctccccatactgacccactagccttacttgggctctgttcgcctgggcacatgcacttacacagctttaaaaaaaaaaggaaaatattataataggatcttttaggcaatcaaagacattcaaaaacacattcagatgtttgtcaggccttctgcttaggcacacccatgaaagcatcccaagccatttatattttgacttgcaaataaactggcaattgctataattgagagcattggcaaagcatcaaacttcccttccaaattctattgttcttatggtaatattaatttctgtctcccaaactgagtgtagaggcatggatatgtgacaataggatgttttctaggccaaggatgaaaaaccatcatgggtaaactactaagaagagtgtttacacagataaaaagaaattgactaacattttgagttttgacttcccaatctctttttttaaacattaatgatttcagagaggaatgtttggaagacacatcattgattatatgctgtacaaagtgatgctctttttattgtaaagcagtgagtcaatgaagatttactgggatctgccaagccaatattctagtggccaaatgtgcagacatttgcagaagcccactctacttccattggcccaggaagcctagcaaccaacggggagttagctgtaccctttgctgatatgcactagtggtatggaggacttattaagaaaaagagagagccttttataattgacaatagcgcttaccttttaaaatgttaaacatactataccatatttttctaagttcagtagtcttactttgggacacagaaatgcatcactatttaaaactcacctatccagcaaccttaactatctggaacatatatgagatccaggaagcaaggtaaataggtttttgagcaaaatagatataacaaaatctatttacctacaggtttggtaggaaattccttcagtcatcactcagaacctagttattcttatttgaaaccaccttaattttctaaaatttagttattgggttttttaattcacatcagatcagaagcaacaatagagtggaaggggctagaagaaactatcttgagtgatctagaagggagtcagctaacaaaagtgagaactattagctgttaaattgaatgtaaagaaaaagacattaaaaaagaaaaaagccgggcgtggcagctcacgcctgtaatcccagcactttgggaggccgaggcaggtggatcacctgaggtcaggagttcgagaccagcctgaccaatatggtgaaaccccatctctactaaaaacacaaaaattagctgagcatggtagtgtgtgcctgtagtcccagctactcgggaggctaagacaggagaatttcttgaacccgggcattggaggttgcagtgagccaagaatgggccactgcactccagcctgggcaacagagcaagactccgtcaaagaaagaaaagaaaagagaggagaggagaggagaggagaggagaggagaggaggggagaggagtggagaggagtggagaggagacgggacgggacgggacgggatgggacaggaaaggaaagaaaagcaaagaaaagaaaaggaaaaagaaagagaaaaagacactaaaaaggaaaggagagaggagagatgggcaaaaggatggagcgagggaaggaggctataaaaagaagactcagaatcttaaaatgctcaagtcctaggcatttgattttggcaacaagccttgatctctaggagcagctgagcacatcctatatccaccatatcacaccataatttttatgttcataaatgaccccagtactccataaaaagtttcaattaggaaatcagagaagcgcctcatttttagaagtgtgcacccaatagattaaaagtttggccgggcgtggtggctcacgtctgtaatcacggcactttgggaggccgaggcgggtagatcacgaggtcaagagatggagaccaccccggccaacagggtgaaaccctgtctctactaaaaaaacaaaaaaattagctgggcatggtggcacgcacctgtaatcccagctactccagagattgaggcaggagaatcatttgaacctgggaggcaaaggttacagaaagccgagattgcgccactgtactccagcctgggtgacagagcaagagtccatctcaaaaatatatatatatataatatataaaacatatatatgttatttataagttatatatatgttttataaggtatatttatgttttatatgtatatatgttatatatatgttttatatatgttttatatttatatatgtatgtttttatatatatatgtgttttcattcctgaaagggtgtgctttagatatttagacatgatgatgccagaaaaatatgttttaattgtgtgcatttatgaaggaaaaggaagaatgggctgagaattattattgccttgctagttgaagatttcacaatggaggttgtcccagttcttgaagtctccacatttccttgatttctgatattgcgatttttattcacttcagctactaacccaaccaccttgcagccacatctcagtgggcttcatcatccatctgcccttgagttcaaattaatgcacacaaagaggttactggaggaatcaagaaggtctcagaacctatcccttaggaatatggagagcctgttgattaatggaaaagagttgcacaactcaaggccaagtgctgtttccgtggatctgtacatgagaatactgcattctatatgactttataaaaatagtcacccaacaggtgttgttgaacacctgtagacatgtttacaggtgacagtgtagggggctgaatatgtagatgaagccaaactgagattgttctggaactttgatgatggtattccagacgggacaatggcagtgggtcaggcgttggaggcttccgtcttaatcactgctcttctacttggttaaatgtagtagttaccatctgcagtaggctgtactggttgtctctggattgtccctagatttgcccaactaaataaagctagccattataacacccagcctcttagctcagagcacaacagccaaaggtttatttctcacccatgtgacagtttgctggtggtcagcatgaactcaagagcctttcatctgttggctgtactgagcttttaggacctcacagtcctcaatttcatcttcttcaggccagtaatggaggagagagaaatagaggggggaatatgtaaaaagctttaaagaccaggactaggctagaagtacagtcatgcatcgcttgacaatggggatactttttgagaaatgcatccttaggttatcttgttgttgcttgaacatcataaagtgtacttacacaaacctagatgggataatctgctgcacacctaggctatatgggatagcctattgctcctaggttacaatcgtatacaacattttactttaccgaatactacatgcaattgtaacacaatggtaagtatttgtgtatctaaacataggaaaggtatagtaaaaacacagcataaaagattttttaaaatggtacacctgtaaagggtacttaccatgaataaagcttgcaggactgggagttgctttgggtgagtcagtgaatgagtggcgactgaatgtgaagccctgggtcattactgtacactactgtggactttatatacactgtacacttaagctacaccaaattttttttaaatttttttcttcagtaataaattaaccttagcttgctgtaacttaactttataaactttcttaaactcattttgactttttttttttttttttttgagacagagtctcgccctgtcgcccaggctgcagtgcaatggctcgctgcaaatctcggctcactgcaaactccgcctcccaggttcaaatgattctcctgccccagcctcccaagtagctgggattacagatgccagccaccaggcccagctaattttttttgtagttttagtagagacggggtttcaccatgttggccaggctagtctcaaactcctgacctcatgatctgcccgcttcagcctcccaaagtgccgggattacaggcgtgaaccaccgtgcctggccttgactattttgtaataatacttggcttaaaacacaaacacattgttcagctgtacagaaacattttccttctttatatgcttatactataaacttttttctatttttaaaagtttttttgttttactttttaaactttttcattaaaaactaagacacaaacattcacattagcctagaactacatagtgtctggatcgtccctattgctgtctttcacctccacatcttgtcccacttgaagttcctcaaggatgatagcatgcacggagctgtcagctcatgacaacaatgccttctggaatacctcctgaaggatctgcctgaggctattttacagttaactttttttaataagtagaaggagtacactgtaaaataacaataaaaagtatagtatagtaaatacacaaaccagtaacatagttattatcaagtatatatactgcacataattgtatgcgctctacttttatacgactagcagtgcagtagatttgtttacaccagtgtcaccacaaacacggcgtaaagcattacgttacgatgttagaatggccctgacatcactaggcaataggaacttttcagccccattgtcatcttataggaccaccaccatatatgcagtctacagtgggcaaagtttgtcattcagtgcgttactgtgtgttatttctacccactttcagaggccaccacttcatcacctgacctcatctaacgacaggggaagcaatgaagtaactttaactgtgtggccagaaaggaaaagaaaaccaaattctgatggacatctgatgtttttactattcctatgaatgtattccaaggttctgagagggtagggaaagcaggaataagagtgggaaaatacatttagcaacattcttgagagttttttcttagacttgtcagtgttctcagttgtgcccatcctcaagctccaaagattctcccacaaggcatttggccaaggcacttcatttttccaggcctcagtttccccatgtgttaaagtgaggggttgaattagaatacctttcaagtctttgggccccttaaagatccaaaatcccatgattctgtaatgattctgtatgattcccctgatgttcccttccccctgagacaaataagcagtgccagtatgccaataatttatgttttattttaattttccttctcaccttcaaagcttgagtttctagatattaatatataacaatagacaaagttgttatgaatacagtagtgacttttatggcaaagtaaagttattttgtgtttggatgaacagcacattcacacacgtatataatatacacagagctccatctgtgaaaaaataatcttgtttgaagtcttgcaaaacttatgtcctcctcctactcttgccctgtattagttttgcaattagtaacaaacaaacaaccgtgacatctctgtggcttagaacaacatttactctccgctcactttacatggggactgtgagtcagcagcagattggctgtggctctgctagaattggctgggttcagctgggctctcagtggggctccacctgtcttctcattttaaaacccaaacgaagggtatagacactatctgtgacatcctaagggcagtggagaacaaaagcaaggagacctaagacaaaccatccagttgcatttaagcttcaggttaaacacggcaaaaaacatcacgaccattcacatcccatgggccatagcttttcacatggccaagtccaaagtgattgaggtgggatatgtactcctctcacagaatgcacgagtacctcccatgacagtgggtaggaatatgcaatcctatggctgggaggaagcaaatagttggggacaataacccaacagatcacacccccaatgcctctatctaagttctaaatacaacatttcccgtagagaggaagccactctgcctcctccactgcatcttcctttcctgcccctctcagcttgagctcaggctccaaaacttgagcgtgataagaatcatctaagtgcttgttaaaaatccccttcctagggcccccctttccaaagatcttgacacatatgatctgaagtaggcagtggtgcccaggcatgatgccccaggaatacctactgctattgaagagctctccccggttcccacagccttcagcatcagacctgcctttggattgggggagcatgctgagtgagccattattaggaagagggctgccttagaggactcagaatctacgaccccaaggtcctctgacctgtccccactcctcacagccagcatggattttgtacttctggagctccttgaaggagggtcattgcacgtttgaaagtgtgatagttagcacagaccccagagatcaaatcctgagttcctcttcctccatatccaactcactagctgtgtgaccttggacaactcactagctgtgtgaccttggacaactcgcagaccgtctctgggcctcagtgtcctcatctgttagaaaggaataataataatacctacacctcaggcttcttgtgagggtgaagcgagttaacaaaacagtgcctggcatgcagtggatcacatataaacatttcatgtgtgatattatacatgtttttatgtatttataagtgtattctatacaagggtttgctgattttattggcacacaggtctgagaacatgggaggcttgtgagataaagttgcctcctattggaggtgttatatggggagcatgctgagtcagctgttatcaggaggaaggctgccttagaggactcagagaatttacgtgtcaggtgatagcatgtaagtcagtggttttcaaccccagctttaatttagaatcatctagaaaggttttttttaaaatgcccatgtccttccaagtgggctcaattctgagccaattagtgagaatgtccagggacaaaacaaagaaatgaaaaattttaaggccgggcacagtggctcacgcctgtaatcccagcactttgggaggttgaggtgggcagatcacttgagaccaggagttcaagaccagcctggccaacatggtaaagcccgtctctactgaaaatacaaaaattagccaggcgtgatggtgcagatctgtaatctcagctactctggtgactaaggcaggggaatcacttgaacctgggaggcagaggctgcagtgagctgaaatcgtgtcactgcactcctgcctgggtgtcagaacaagattctgtctcaaaaaaaaaaaaagaaagtaaagaaaagaaattttaagacactccttggactgtaatgggaatcctggattagaaaccactgatgtctatagaacagctctgtaaactgcaaaacataatgtatgatttatgggtgttttttgattgttagtaactgattgatgatctcatgagggactagttcctctgaaaatcaggccaacgtgggttttccaccatctgtcctacatgtgcactggctgggggaaattgaaactcatccaattcctattcttgcctttaagccaaaaagactgctcgaaaacaagcctccttgggataaaagatgttgctaggatgaggaagctgtagtgagtgagtggagttaatgtgattagatttggaagcaatacttccagccatggggaagcatcggtgttctgtgttattaaagtgactccagtgcaaaggcacatatatcgtattggagtaatttgccctgactaggttagaagccaggagatggttcttcacaggtattcctgagtggcccaaggtctaagtcagctctcgtttagacaaatcctatctctgctgatcatctacctctcaccaaatgcagccatcaccatgcacagcacatgcgctcctcttgatgatcttcacagagtgcagagtcttcaggaagttctttcctcagtggaacctttgggatttctaggagaggggcaggggaatatctggaatcagaggtgaacactttacagcagcctctaaactacttctaattacgttcacctgactaaactgccaggtgataaacgttttatataaaagtaattcactatggaaagttctggatgttttccccaatgggtacctcaaaacagggtacaagatggaaacctgctcaagaaacagcaaaatgtaaactggataatggtgatgataaaaaaataataatgaatgaccacacgagcaagtgtcctcttgtgaactttcacagacaaatgcatagatatgctgcctggactatgggcagataaacattcattgtgggcacatgtttgtgtgaagctaattattggcagagcaagaacagctggaactttcatctccccacctgcaggccagggttctcttggcactatatcctcagttttcaatgtcttcctgaaagagcggctgccatgttctccttaaaacttctttagattcccctgtcaaatactgaaaactatgctggctgtaagtctagtgtttgaaataccagcgtgggaccagtcttcctatatgcagagttttgtcccatgtcttagaatctttttctgttttcttcaccttttgggcttcatttattcacaatcattgactgttgacattgggcagagcttgtataacagtcttaatctttagcctggtatgtaatatctaatccctgctgttcctcttcccgccctgagcacattatgtcctttactttccagattaagtgttggcattctgtactggaaagaaaactccaacttcttgccatgtgcagtggctcatgcctgtaatcacagacctttgggaggccaaggcgggtaaatttcctgagctcaggagtttgagaccagcctgggcaacatggcaaaaccccatcactgcagaatatacaaaaattagctgggtgttggtggctcgtgcctctagtccccactactcaggaggctgaggtgggagaatcacctgacccagggaggtccaggctgcagtgagcggtgatcatgccactgcactccagcctgggcaacagaacaagaccccgtctcaaaaaaaaaaaaaaaaaaaaagcccaactcctggaaatcaaatggtacctgatgtgaggttttctccctgttatgttagcctcaggccatctaacccaggtagaacaaggcaggtaaggaaacccagtgggccaaggaccccgaaggaagcccttaacacaatgcctaatactgaaaacaacggatgaatgtattcaaaatttgtttgcaagaaatgagactttttgcctttttaggacaaaaaaagcacttgaaatttaatttaggttaacaggagatatggcgggtagcacagagtgattatgaaatgcacagggcttccctgccattcgagttttgatcaatctcagcaaaacccaaagtttgccaaaacctggaaacaactcaaatgtccatcaacacagtagaatgaataaatgagttatggtatttcattcaatataacatgaatgaaaatgaatgagatgaaatgaaaatgaattatgtaaaactacatgtaacaacaaggatgaatcctacacccatgtgaaatgaaagaagccacacacacacacactcaagaaatgcatgttgtatgatcctatttatataaagttcaaaggtaggtaaaattaatctgtactgttagaagtgggaagaatggtttctatcaggaaggagtaggtagagattgggaggagttgcaagttggatttctggggtgctactggtggttaatctcttgacctgagtggtaacatagatatattctttttgtgatacttcattgagcagaatacagtcataagtgtcgcttcatgatagggctaagttctgagaaatgtgtcaagagatttcattgttgtaccaacatcatagagtatacttatacaaacctagattgtatagcctactacacacctaggctagatgacatagcctattgctcccaggctacaaacctatacagctgtcacagaactgaatactgtaggcaattgttacagaatggtaagtgtttgtgtatctaaatatatctaaacatagaaaaagaacagtaaacatacagcattataatcttatgggaccaccatcatatatatggtccatcattaactgaaatgtcattatgtggcacatgactgtacttacaatttgtgcatgtcatatgtatgatagtctaaagttcaaatgttggattgggccttgcttgattatccaggaactgagtttgcaagagctaaaaagaacctcagaatccctgcctaacagggatggcagggtccatttctggaccctaatggtaggtccatttctggagttaggaaaactgagtcaaaaacctgagtagaaggttgcagcaacagatacagcaggacaggttggggactgtactcagggggatcaccagataccagtcttgggagcaagttccacagaatggtagggctgagattgctggcaggcaggattggcttggggactgcataggccagaacataaaggtgaagtctaagagagggtattgcagaggatgaggggttgacagtggggagtggtatgttgggagctcagatctggtttatttttaactctcatgaggccacactgcctcctctcctatgttattcccttcctaatgtggatagtatggtcagcccaggccatgggagtgtggccccgattttccatgtagggagactggctctagtttctcaaaagcacaagctgctggacctttttctcaactgttggcctacgtggaagagacttggcttaatggaagggagaatgaagagaggcttttggaaagagagggcctaaacaggatcagcattgatgccaagcaacacaagggagaagggacttttcttggcgttcataccacggtgggccacagcgtggtgggaaggcatatttgcatatggtaaggggaggagcttaagggtaagagagtctttgaagattgggaagcaaggaaaccaaggcagctagccacaggcaaggtgtgggggctgcaaacttgctataaacctgctcttcagatccaccacttgcatttttaaccctcagtcaaaaccaaggagctgctgaggagtgatgcctaagatgatagtccccaggatgtgtggggctgactttttgctaactgaactgcaaatatttggagccatttgctgctataacatcttaaaaagatgaggcccctcattggatattccagtcccaattgggagagaataagaagggccacgcctgccctcgatcaagatcttgagtgcaatgcagggtggactcagagagacaaaaacctaatttatccccagcttagtgtctgccagccataaaaagaaaaaaaaaggtcggtggataaacaagagatgtgcctagtgctgagaagcatctccttgtgtgttcagagttaattaacatttagcatagcccctttaggggtgagaagttgtgattgtctttctctaaaggttaaattacctccattatgtttgccttcctgggaagaaaatgcaggatgagttggaaaatcactgttgaaacacaaccgtgacaccactgtgagtatgtctaattccctggcatgggggttttaggcattagaaagtgcataatagtaactagattccaggatgtgtctcaggaaatcccaaagggaagctttttttcattcatagaatacttcctgaagacattattataggaaaactttatttaggagagtttctttgatcctgtactagcacatgagaacatgtaagcagatgacaatatctaatatctactgctgcctgacccactctgcttcccatcccagagtttcttttgcaaaacgcatggagccctgcttcgacaaagctctctagatagcacccaacctcaccaggaaggtctgatttatagcatgttgatcttaagcatgttagtgcaacgcccaaaagagaaaggaagtctcaataaagggatattatagaaagtcttcagccagtggatagactctcatctctaagccaggctgagatcaccagatcagcaggataaagaactatttggggctatatgtacctaatgaggctggattcatgagatcaacagtatttaaggtccttgggcgtaagtagggcagtagctgagaaggcctctctcggctctggctctcctgcccctactcagaatgccacactcacccaaggcttgatgttgctcactgtgggtcagtggctgttgtctccaccgtctctcccacagagggggaataattgcacccccatcacagactttccacaagtcaggatgatctctcagtggctctcaggtttcccaagtatctttcccccatgggcatttgactgacaatctactaaatctctgtacttccatttgctcatctgttaaaacctgtagctgctcacggggctgttgtgatgacaaaatgaaatttacatgattaaggtacttaactttccccagtgcctgcccataatagatgctccagaagtgttaggcattattttaaacccagtaggagtctttaaccacttgattttaattagatgaccctcaggggtgagatgcagtgggtgatttagaaagtgcaccctgggagggcatttgcttggaaggaatcttgtaggagcaggtagaaggtccccaaaagaacaaaatacgggtcacctcacaggatccaccactggaccgggatcctttactgaagctggagcctcattatgaaagagctacttggccgggcacggtggctcacgcctgtaatcccaacactttgggaggccgaggcaggtggatcacgagttcaggagagcgagaccatcctggctaacacggtgaaaccccgtctctactaaaaatacaaaaaaaattagccgggcatcgtggggggctcctgtagtcccagctactcgggaggccgaggcaggagaatggcgtgaatccagtaagcggagcttgcagtgagcccagatcgcgccactgcactccagcctgggcgaaagagcaagactctgtctcaaaaaaaaaaaaaaaagagctaattgatggtacctgggtgcccaaacctctactgttgctatcgtttctccatgtctgagtacgtcccacaaggagcagtagcaaaagctggtctttcaggggctcatcaaacacactcagacgtttcaaatgtcccaagatcggcagctttgatcctgaatgttcttcccttgattaaaacaacaacaacaacaacaacaaaaaatgaaacaataaaaatttaaagagaaatttaggccgtgcatttctaagaatttacacttagttcattaaatctattgttttctcagttgtttgaagtccaacaagactaatgagcctttttttccaaatgtctttaaaaatccttttttcttacaaggccatttagaggctttgaacgttgttccaagggtaataatattagtattaataataaattattccaaactcccaacccctgcaggttcagaatttacttaatactctgaacccaaggaatttaaattattaccagaatttattaccttttgtttatggggctttccaaacaggagaaagaaaccacgtggaggttcactagagtgcattgtgtggttcgctttgcggtaatgcatataacccagaagacttccagaaccttctcagcttgaaccttcaaagcctccctaatttggtggaatcagcatggttatgttgagattgtactgagggtactgacttttcagcctggacaatttttggctgatggaccagagcaagagccctcgtaggattctcccataggacatacaatctatgttacataagatggatgatatattgttaggtggctatggggtggaaagagaacaatttttctctggggtgtgtgcaaaggaactgactgccttgctgccccttgaactctctaccttgtcatctgaggacctctggtggtggaaattttcccagcgtgtgtgaattgatgtttctgtgccaagccatccaaccctgttacattttcctacattcctttcctcctattttgtcattcacattaagcaaggagcaacaatcagttgcaaatacccagaataaagtggtggatgtgcctgaccagactgccatttcacaaaagttacctgctaccttctcttccagtgaacttctgatacatttcctgcagcaagagaaggcagccaacatgaaggaaaatgtggcatctgcaaccgttttcactctgctactttttctcaacacctgccttctgaatggtaagtaagaggctatcacgctctctttcattgcctggggtgtttgtcaacagggtggagagtccatgcagtcttcttgcaatgccattatgaaaaatgaaaatgctgtgttatgtgctgctgttaaattatttgcaatattttgcattaaagttaatgcagaaaaattaatgcaattaatgcaaaatcttgtcactgtgctctctgccttttgtcctcatttcaggagtgtaatgaaacagctctgaagaagacaggacctgagttctaatccaggtcctgccagtttctagctgtgtgacctagagccaattacctaactctctgggtttccaaattctcaaagtgaggacagtgatgtttcctctactgcagatgaaataatgtatatgaaaactctttaaaaaaccataatgggatataagaggttgctgttacatggcgggaagcaggtacagccgactctattatctgtgctaacaggagaaatgaagtccacagctaaatgagagggtgggtgcctgtgactatacacttctgtatgtcaacccatgtgcatttctgggtgtgcagacttctatatgtacctgtgtatatattaacttttctatatggacctgatttcaaatgtctctctgtctgaacctgtatgtatatacttttatgtatgtctgtgtgtgttctgtgtatatccgtatgtgcacacttctctgcaggtacctgtgtgcatacaagtatgtacttccatgagtatgcacctgtgtatatttttgtgtgtgtgtgtggtgtgtgtacttttgatgcgggctctgtgtgggcatctacatacctgtatatgtggttcctgtgtggttttctccgtgtttctgtgcattgagaaagtccattaatgttaacttgttcctctaatgcagatgaaggaaacatttgtctaattgtaattttacaaatctaccctcctctcttgagcttcctgaaggtactattaataaacagtaaaataagaaagagaagctttcagagagagaaaaaggggaaagcagaggtcagaatgacccacaagagaaactaaatactcaagaaatcaatgatcaccctaattggcttccgagtgtgctcattatggaaccataggctttaaactttttaaataaacttttctttctacttcacacacttctccccactcatgacaaaagcaaagcaaaacaaaaacttgcattcttgctgtaactcccagcaacacattatcctgaataaattgttcctagaggatgagcaatgttacaaatattggcagagctgacccgggctggcaaggacgggttttagcagggcctgtgagcaggagggtaggtgagtttcagctgacactactagcctggtgtcctgggctccagcctgtgtcccacagcatgccattccactaaattcctctttctggccagctctgcctagagaatcctcttcccacgcatttctcctcactgaggtctcctcctaacctgctgtttctgctctggtgctcagctagaaactctggccttggagcctgcatgaggggtagaggagaaaacagagagaacccccggaggtgctgacccatatctgaaagcgctcctctctgctcctgatatcctaaactcaatgctagggcatccagctagacaaaaaagaggatcagctgaagtcatgtaggcgagcatggtggcttcccagccccacagtatcagggcaaattcccagggctctgctgtccctctttgaacctgacatccaagcaagagaaatgggagcccgcttgccaagagctttggggatttggcaactaaaaaattttacactcttggtgttatattttcacaccacctcactgagaccttctagcatccagtctggaactgggtacagctcttagataacagtggttgctcagaaccaggagaggagctggctactctcctacctcttaccacacctcctaccccaaaaagatccatcaaattatagttttatagaccctatgggattacaaaagggccacacactcttgaagccctacgtatccaaaggaagccctttgcaacctcaccacacacacacacacacacacacacacacacacacaaaggaaagagaggaaaatctaagagaaaaaaaaggactaaaaaccaagattcagaaatggggatggggtggatgaggagacagactgtgagtctgggtcacaagatcaaagctgaataaaatcaaggaaaagtggccaggtgcagtagctcatgcctttaatcccagcagtttgggaggccaaggtgggcagagcacgaggtcaggagttcaagaccagcctgaccaacatggtgaaaccccatttctactaaaaatacaaaaacttagccgggtgtggtggtgtgcacctgtaatcccagctgctcaggaggctgaggcagaattgcttgaacccaggaggtggaggttgcagtgagccaagatcgcaccactgcactccagcctgggcgatagagtgagactccatcccaaaaaaaatcaagaaaaagtgaagggaaaggggaaggaaaggagaagatggggaaagaggaaggaaaggatgcccagatacagggagctttagcgatgtagtgaacggacagaagatcaggaacaagttgagttcattgtgtggggatggcagaaagatggagattggtgagctgagtggagaagtgccatagagcggtgttttgccagagtgtctgcggattgctcatacctgggaaggattctttgtatggttcccttaggctgagggagggtatcagctttacagaccttgtgggattacaaaagggccaccacacactcttcaaccaatatgtgtctatcttgcattcaaggctcattctttgttgaaattttgcagttggtcactaggctattgttatctccatctcaaagtacacagacacacacacacacacacacacacacaccagcaaaatgctctctaagagcaatgccaacatcagggcagcccacagaggagtgttgctggatgctgatgcttggcattcctgagcatccaccctaggtctcctcagcctgagacttcatcgctggctttggtccatcaatctgtttctgtcaccagcagaagggtcaaatggttaaatggacctcaatattgatgcagtggcttctggctttttctaggacagttacctcctggaaaacctgagatctttaaatgtcgttctcccaataaggaaacattcacctgctggtggaggcctgggacagatggaggacttcctaccaattattcactgacttaccacagggaagggtaagaagttcccttctctcctatgaaaccccacatgagtactcccattctccaggccaaagaaacactggttctgagtgacagcacatccctgaatttacaccagtaaggttcataccaccggggaaaggggagtctaaggtccatgcccacattctcctgttaatgtctgttaagagctgtgtcaatatacataaggttaccagccatagcagtacaatatcagtgttactggatgctgatgcttggcatttctgagcatccaccctaggtctcctcaccctgagacttcatcacttgcttgggtcccatcaatctgtttctgtcaccagcagaagggtcaaatggttaaatggacccaatattgatgtaatgtttcaaatcccctctcacagcttaggttgcagcctgaggccccatagaagtgtttcttaattgctagttaatcttaaatgctcatctataattcttatgccatttgtattttttttaactaaacatgtcacttttgcaaaataagtaggatcgtgtgaagtggtaccatacaatccttgacaaatgtggtatattaggttttcaaacttgtttcatgttcaagaaaataaagaaccttgtagggaaaagaaggtgaggttttttccttagcacattgctcatccaagagccaccatctcctagaagacatattgggacctaaggttgaaatgagggctaaaccagatcatctctgtgcaagcattttgttacgctgacagtgagaccctcctgaaaatcatgggagagctgcattcttcttcagaaaggaaaatatttagttgctggtagagacagctggcccactttccaatgactgcactttgttgtacacaaaactgtcatcccggctgaaatccaaagggacatcatgtaaacagatttcaggaactcagatgcaaccagaattgaacaagcctccacccctgtgcagtgtatcttgagctgaggttcctgagtctaaatgtgagcagcctactgagccacgtgggcttgaaatacctcctctcaacgtcacttcactttattgctgacttggtgcagtctgaaatggaccaacatcagtttttgtcctcttgaacccttttttaaaaaacgaaaagtaattcaacacgtatgtgaaatagctgctgcattgtgcatgacccctctgtgtgtggacaggtgaaagttccaatttcctgaggcaacccaatgggcatgacctgggtatggtggtgcctgggccattgaaagctcgagtgtttatcagcagggaatataggtccccgagcccacaagaacacttatagaaaggaagggttgatggaagaagaatacttgaggccctaaaataacctttccaacatgctcttccctctctcactcccagctgaaatgggcagaacatggaagcctaaggaaccatttgtcagctctgggttttgcgcttggaatttctgatacccaaaggccagtggtattgatctatgaagaaaaaaactagactctctttattactttcttattcattcctaatacattacttattgcagagagacactcatgcatgaatgtccagactacataaccggtggccccaactcctgccactttggcaagcagtacacctccatgtggaggacatacatcatgatggtcaatgccactaaccagatgggaagcagtttctcggatgaactttatgtggacgtgacttacataggtaaggggaaggaaagtgggtgaggaatttcttactccactatgtattagccaatagtcacactcagtttgagtcttcttgggttttggatggatccccaaaaagaaagatgagaaaactcacgatatgcttgtcaacagaacagttcaaatcattttttatcaagtcattcatgacactaaggctggcacttgggatccttgtgttcctgtgctttcccttgaccctcatcctcttgcactcagcacaaatgttctatgtatgtttcccttgccaactcttctttcttgccctgcccttgcaattgatgtccgcttcttccttggcaagctgggatttcttttatttctcctcatggaagacagagctgctccatgaagaagaagttcttagaagggttcatctgattctgcacccacagcaattgctcccattgctttgccccaaactcatatatgtgtgtgtgtacatatatatgttgcatatatgcgatatatatattagtgtgtgtgtatatatatatatacatcattggtaattttttttactaaacatttacaaagtaatcatgttacttttataacataagataatatgaggtggtgccatgtaattcttgacaaacatggtgttcaagaaaataaagaatgtaggctgggcgcggtgcctcacgcctgtaatgccagtactttgggaggctaagacaggcagatcataagatcaagagttcaagaccagcctgaccaacatggtgaaaccccatctctactaaaaatacaaaaattagccggctgtggtggtgcgtgcctgtaatcccagctactcaggaggctgaggcaagagaattgcttgaacccaggaggtggaggttgcagtgagccaagatcatgccactgcactccagcctgggccacagagcgagactccacatcaaaaaaaaaaaaagaaaagaaaagaaagaatttaaatgttaaaaactaccaatggtctgtgcacacacacacacacacacacacagagagagaggaagagagagagagagagatttatcacctctgcatctactggtgctgccaaggttgcaggaaggtcatctccaagctgaacgggaagctctctggcatggccttccatgtccccaccacagatgtgtcggtcatggacctgacctgctttttagaaaaacttgccaaatatgatgacatcaagagggtggtgaagcagggacaatgttctggagagccccatggttgttgtacctcagttgcgctgaggggccattcacagtcttctttatggagtgctggcatggactgtggacatgagtccttccatgatgaatgacaaattttatataagtgtggtgtgtgtgtgtgtgtgtgtgtgtgtgtgtgtattgccttaccctcaagcattataatatttgaaggcaaaacaatgaaagcaagaaatgttctgaaattagcaactgttttaataaatgcgacccacaaaaaaagggactcactaaagaaaagtaatatgtttaaaaagagaaatcaacaagtgtatatgaaattctcattgatcctggaaaacaaattctctggtgaaagaatatgttggaccatatttttcaaaataataaaagaagtgtccacagaactctcctataaccctgcagcctacagtgttgggacaggccacggaagttcattttaaaatgcacggtacattttctgacacttcgactctcatccagcaataacctgcagtacagaatgacaacattgaaagataattgctcaggagtagagttctttgttgttgagtaatatttagttacattgaaaacacttaaaagcagtggttctcaactgggagctgttttttcttcccacaggatatttggcaatgactggagacatttttgattgtcacaagctaggaaagtggggagatgggggtattacttgtatgtggtgcataaagcccagagatcctgctaagcattctacaaagcataggacatccccctccaacaaagaaatatccagtccaaaatgcaagtagtgctgaggttgggaaagtatgctctaaaagatacatcctcaacattttatttgcgtttttgtataattttttatcagaagcattgtttagtatgtatttaacttaaaacatatattaattagctgctgtttgtttaggaaatgtgctcaaaataatctttcttaggtatttactcagtaacatattagcttagacttgatggcaattttctttttttagtacaggggactttattgatggcacatggcaaagtgggtctccctaagcacctgctcttcagggagtctgcataaaaattgtgaggggagattctcactgaggtggagcactgagtgccacagggactcgccagcagctgagggtctcactcttgctcttgtgtgctcactgggggtggtggtccaggggtcttactacatggaggccatgtggaccatgagtccaccaccctgttgctgcagcctaattcactgtcataccaggaaatgggcttgacaaagtggttgttgagggcgatgccagccccaaaagtagaagagggggtgtcactgttaaagtcagaggagacagcctggtgcttagtgtagcccaggaggggtgtgtgtgtgtgtgtgtgtgtgtgtgtgtgtgtgtttgtgtattgccttaccctcaagcattataatatttgaaggtaaaacaatgaaagcaagaaatgttctgaaattagtaactgttttaataaatgtgatccacaaaaaaggggatcactatagaaaagtagtatgtttaaaaagagaaatcaagtgtatatgagattctcattgattctggaaaacaaattctctggtgaaagactatgttggaccatatttttcaaaatcataaaagaagtgcccacggaactctcgtataaccctgcagcctatgaaggggccctccgatgcctgcttcaccacctttttgatgtcatatttggcaggtttatccagatggcaggtcaggtcaccactgacacgatggtggggacatggaaggccatgccattgagcttcccattcagctcagagatgaccttgccctcagccttggcagcaccaacagatgcacagatcatgttctggaaagccccacggctgttgcaccacagtttcccagaggggccattaacagtcttggtggagtgatggcatagactgtgaacatgagtccttttgcaattgatggcaaattttttttattattatactttaagttctagggtacatgtgcacaacgtgcaggtttgttacatatgtatacatgtgccatgttggtgtgctgcaaccattaactcatcatttacattaggtatatctcctaatgctatccctcccccctccccccaccccatgacaggcccctgtgtgtgatgttacccaccctgtgttcaagtgttctcattgttcaattcccacctgtgagtgagaacatgcggtgtttggttttctgtctttgcgatagttttgctgagaatgatggattccagcttcatccatgtccctacgaagacatgaactcatccatttttatggctgcatagtattccatggtgtataagtgccacattttcttaatccagtccatcattgatggacatttgggttggttccaagtcttgctattgtgaatagtgccgcaataaacatatgtgtgcatgtgtctttatggcagcattatttataatcccttgggtatatacgcagtaatgggatggctgggtcaaacggtatttctagttctagatccttgaggaatcgccacactgacttccacaatggttgaactagtttacagtcccaccaacagtgtaaaagtgttcctatttctccacatcctctccggcacctgttgtttcctgactttttaatgatcaccattctaactggtgtgagatgatatctcattgtggttttgattttgcatttctctgatggccagtgacgatgagcattttttcacgtgtctgttggctgcataaatgtcttcttttgagaagtgtctgttcatatccttcaccaactttttgatggggttgtttgatttttttcttgtaaacgtgtttaagttctttgtagattctgaatattagccctttgtcagatgggtagattgtaaaaattttctcccattctgtaggttgcctgttcactctgatggtagtttattttactgtgcagaagctctttagtttaattagatcccatttgtcaattttggcttttgttgccattgcttttggtgttttagtcatgaagtccttgcccatgcctatgtcctgaatggtattgcctaggttttcttctagatttttttatggttttaggtctaacatttaagtcttaaatccatcttgaattaatttttgtataaggtgtaaggaaggtatccagtttcagctttctacatatggctagccagttttcccagcaccatttattaaatagggaatcctttccccatttcttgtttttgtcaggtttgtcaaagatcagatggttatagatgtgtggtattatttctgagggctctgttctgttccattggtctgtatctctgttttggtaccagtaccatgctgttttggttactgtagccttgtagtatagtttgaagtcaggtagtgtgacgcctccagctttgttcttttggcttaagattgttttggcaatacgggctcttttttggtcccacatgaactttagttttttccaattctgtgaagaaagtcattggtagcttgaatctgtaaattaccttgggcagtatggccattttcatgatactgattcttcctatccatgagcatggaatgttcttccatttctgtgtatcctcttttatttcattgagcaatggtttgtagttctccttgaagaggtccttcacatcccttgtaagttgggttcctaggtattttattctctttgaagcaattgtgaatgggagttcactcatgatttggctctctgtttgtctgttattggtgtataggaatgcttgtgacttttgcacattgattttgtatccagagacttgctgaagttgcttatcagcttaaggagattttgggctgagatgatggggttttctaaacgtacaatcatgtcatctgcaaacagggacaatttgacttcctcttttcctaattgaataccctttatttctttctcctgcctgattgccctggccagaacttccaacactatgttgaataggagcggtgagagatggcatccctgtcttgtgacagttttcaaagggaatgcttcctgtttttgcccattcagtatgatattggctgtgggtttgtcataaatagctcttattattttgagatacatcccatcaatacctagtttattgagagtttttagcatgaaggctgttgaattttgtcaaaggccttttctgcatctattgagataatcatgtggtttttgtctttggttctgtttctatgatggattacatttattgatttgcatatgttgaaccagccttgcatcccagggatgaagcctacttgatcatggtggataagctttttgatttgctgctggattcggtttgccagtattttactgaggattcttgcatcaatgttcatcagggatattggtctaaagttctcttttttggttgtgtctctgccaggctttggtatcaggatgatgctggcctcacgaaatgagttagggaggattccctctttttctattgattggaatagtttcagaaggaatggtaccagctcctctttgtacgtctggtagaattcggctgtgaatccgtctggtcctggactttttttttttggttggtaggctattaattattgcctcaatttcagagcctgttattggtctattcagagattcaacttcttcctggtttagtcttgggagggtgtacgtgtccaggaatttatccatttcttctagattttctagtttatttgcatagaggtgtttatagtattctctgatggtagtttctatttctgtgggattggtggtgatatcccctttatcattttttattgcatgtatttcatttttctttcttttcttctttattagtcttgctagtggtctattaattttgttgatcttttcaaaaaaccgctcctggattcactgatttttttgaaggttttttgtgtctctatcaccttcagttcttctctgatcttagttatttcttgccttctgctagcttttgaatgtgtttgctcttgcttctctagttcttctaattgtgatgttagggtgtcgattttagatcttccctgctttctcttgtgggcatttagtgctataaatttccctctacacactgctttaaatgtgtcccagagattctggtatgttgtgtctttgttctcattggtttcaaagaacatctttctttctgccttcatttcattatgtacccagtagtgattcaggagcaggttgttcagtttccatgtagttgagcagttttgagtgagtttcttaatcctgagttgtagtttgattgcactgtggtctgagagatagtttgttataatttctgtccttttacatttgctgaggagtgctttccttccaactatgtggtctgctttggaatacatgtgatgtggtgctgggaagaatgtatattctgttgatttagggtggagagttctgtagatgtctattaggtccgcttggtgcagagctgagttcaagtcctggatatccttgttaactttctgtgtcgtcgatctgtctaatgttgacagtggggtgttaaagtctcccattattattgtgtgggagtctaagtctctttgtaggtctctaaggacttgctttatgaatctggtgctcctgtattgggtgcaaacatatttaggatagttagcacttcctgttgaattgatccctttaccattatgtaatggccttctttgtctcttttgatctttgttggtttcaagtctgtttcctcagagagtaggattgcaacccctgcttttttgttttgttttgttttccatttgcttggtagatcttcctccattcctttattttgagcctatgtgtgtctctgcatgggaaatgggtctcctgaatacagcacactgatgggtcttaactctttatccaatttgccagtctgtgtcttttaattggagcatttagcccatttacatttaagattaatgttgttttgtgtgaatttgatcctgtcattatgatattagctggttattttgctcattagttgatgcagtttcttcctagcattgatggtctttgcaatttggcatgtttttgcagtggctggtaccggttgttcctttccatgtttagtgcttccttcaggagctcttgtaaggcaggcctggtagtgacaaaatctctcagcatttgcttgtctgtaaagtattttatttctccttcacttatgaagcttagtttggctggatatgaaattctgggttgaaaattcttttctttgagaatgttgaatattggcccccactctcttctgggttttagagtttctgccaagagatccactgttagtctgatgggcttccctttgtgggtagcctgacctttctctctggctgcccttaatgttttttcctttattttaactttggtgaatctgacaattacgtgtcttggagttgctcttctcgaggagtacctttgtggcattctctgtatttcctgaatttgaatgttggcttgcctttctaggttggagaagtactcctggataatatcctgcagagtgttttccaacttggttccattctccctgtcactttcaggtacaccaatcagatgtcgatttggtcttttcacatagtcccgtatatcttggaggccttgttcatttctttttactcttttttctctaaacttctcttctcacttcatttcattcattttatcttcaatcactgataccctttcttccacttgaacaaatcggctactgatgcttgtgcatgcatcacatagttctcgtgccatggttttcagctttatcaggtcatttaaggtcttctctatgctgtttattctagttagccatttgtctaatcttttttgaggtttttagcttctttgtgatgggttcaaacatcctcctttagctcagagaagtttgttattaccaatcgtctgaagccttcttctctcagctcgtcaaagtcattctccgtccagctttgtttcgttgctggcgaggaactgcattcctttggaggagaagaggtgctctgatttttaaaatgttcagcttttctgctctggtttctccccatctttgtggttttatctacctttggtctttgatgatggtgacgtacagatggggttttagtgtggatgtcctttctgttagttagttttccttctaacagtcaggaccctcagctgcaggtctgttggagtttgttggaggtccactccagaccctgtttgcctgggtatcaccagcagaggctgcagaacagcaaatattgcagaacagcaaatgttgctgcctgatccttcctctggaagcttcatctcagaggggcacctgggtgtatgaggtgtcagtcggcccctactgggaagtgtctcctagttaggctactcgggggtcagggacccacttgaggaggcagtctgtccgttctcagatctcaaactctgtgctgggagaaccactactctcttcagagctatcagacagggacgtttaagtctgcagaagtttctgctaccttttgttcagctattctctggccccagaggtggagtccacagaggcaggccggcctccttgagctggggtgggctccacccagttccagcttcctggccactttgtttacaatctcaagcctcaggaatggcagacacccctcccccagcctcactgccaccttgcagtttgatctcagactgctgtgctagcagtgagcaaggctccatgggcttgggaccctctgagccaggaatgggatataatctcctggtatgccatttgctaagactgttggaaaagcgcagtattacagtggtagtgtcccaattttccaggtaccatctgtcatggcttcccttggctagtaaagggaattccctgaccccttgcacttcccgggtgagacaatgacctgccctgcttcgcctcacgctccatggactgcacccactgtccaacaagccccagtgagatgaacctggtacctcagttggaaatgcagaaatcacccgtcttctgtgttgctcacgctgggagctgtagactggagctgttcctattcagccatcttggaaccagaccacggatggcaaatttttaaaagttggtttttaggcaaatgtaactcataatgccaagtacactatagttacagtcactctttccccatctggtacagagattgatttaaggaggtgataaatgaatggagaaaatgtcactgaacagcagaactgagactgggatgaggcaagccagcaccccagcacctaagtcttaggaaggtactcacaaggcctgtacctacaggagcctacagaagtaaatgcctccttcattttttttttaattcttgccagcaggaagccacttcatttgtttttattgtggcaaaaacacaaaacacatatccaccatttcaactattttatagtatgcaattgaatgcattagtttattacaattttatgcaaccatcaccactatctagttctgtaacacgtttacctccctcaatgaaaacttcacatccactactaagcagttacttctcatttctcccttcctcaagccctggcaatgactgtctgtttctgggagtttgcctcgtctggatatttcatatatatatatatatatatatatggaatcataaaaaatatgaagctgttccacatttttttttttgaaatggagtttcgctcttgtcacccaggctggagtgcaatggtgcgatctcagctcactgcaacctctgcctcccagattccagtgattctcctgcctcagcctcccaagtagctggaactacaggtgcacaccaccacgcctggcaaattttttgtatttttagtagcgatggggttttaccacattggccaggctggtctcaaactcctgacctcaggtgatccacctgcctcagcctcccaaaatggtaggattacaggcataagccactgtgcctggcctctaccacattttttatccattcatcaactgatggacatttggatttcttcacttttggctattataaatagtgctgccatgaaaattcacatacaagattttcttaaacatctgttttcaattcttttgaatctatatctaggagtggaattgatgggcaatatggcaactctaagtttgactttttgaggaacttccagactgttttccacagtggttgcaccagtttacattcctaccagcagtattgagggttccaatctctccacatcctcaccaacacttgttatgtttcattttttaattcttgccatgctagtacatgtgaaatggtatctcactgtggttttgatttgcattccccagaaggctaatgaccttgagcatcttttcatgtgcttcttggccatttgtccctccttgaattttgtatcctatgcacttcactcacgtcagcctaatcccaggcctgctctccagcacctgacatcaaacgcaatgtcttacaaccatggtagagtgaaatagtagagaccacttcctctaagtcacatagttatgggttcaaataacacttttaccaaatatgtgaccttaggcgagtaatttccctcttctaagcctgtttcctcctctgtaaaatgaatgggtacaataatagtacttcatggagttgctggaggattataagaaacgatgcagagatagtattttatacagtccctggcatgtagtaaatactcgagaaacattagctgtcattttgctaatgggaattcgctaagcatttgttgaatgagtgactgggccaacaggctgttatgaaatcaccaaaaggatcattgccaaaaagctcaacctccatttagcttatgggagagtggatctcatttaccacagggtgtaatatgtatgttgaatataagatgtaattgctgaaacgaagatggaatctgtaaacctgttatctgcagagttatgattatgaatagttcatttacaaaaaactgtgtgtaactaaggagaatctcatgcccagctgagggaaataagctgtttgaaatctctttccctatagtcttccatgccaactcccacttgcaaatcccagcccagtttttatcacctggtctctgtcatcatgaaaattatggggatagctatgagattctaactgatgaaaagcgagaacatgcggagaatgaaataccagctgcttattattcttaccatgtaaacctcatctgtatgcacaaatatgattggtcacatactaagaggtagaagacaaaaggcccgggtatttggggggcttatagtacagtgggaagagtgagatgataaacagaaaaaggaattcctaatagaaaatggtaaagccaaagaaaaggtgcaagcaatgagtgctactggcatttgctgtatttctgcagttcagccagaccctcctttggagctggctgtggaagtaaaacagccagaagacagaaaaccctacctgtggattaaatggtctccacctaccctgattgacttaaaaactggttggttcacgctcctgtatgaaattcgattaaaacccgagaaagcagctgagtgggaggtgagtgatccatatgctttttgaaggaactatggcctttggcaaggataaagccctcacaactgaaaacaggtcattcctcctaattactgggtcactgtgttggcctccaatgcagttgtgacccacccagatgtgaaaagcccttttcccctctattgggattgatgggggctcatcttcacagctctcctcgggctagtttcttgtactgctcagacacttgaccaggtttccaacctgcctcccttagtacattttagatctagacccttgtaagagtacttaaatggcaccaggtgggagggggcagtctcagtatatcccgtccatagtcaatggctgtgtttttatttactttaaaatacctcaaccaggctgggtgcagtggatcacacctgttaatcccagcactttgggaggccgagacaggtggatcacctgaggtcaggagttcaagacaagcctggccaacaggaagaaaccccatctctactaaaagtacaaaaaaattagccaggtgtggtggcgggcacctgtaatcccagctcctcgggaggctgaagcaggagaatctcttgaacccaggaggcggaggtttcagtgagctgaaatcgcgccattgcactccagcctgggcaacaagaatgaaactccatttggaaaaaaaaaaaaggctgggctcaggggctcacacttgtaatcccagcactttgggaggcagaagcaggtggatcacttgaggtcaggagtttgagaccagcctgaccaacatggcaaaacccagtctctactgaagatacaaaaaacttagccagccatggtggtgagtgcctgtgatcccagctactctgaaggctgaggcaggagaattgcttaaacctgggaggcagagatttcagtgggctgaggtcatgccattgtgctccagcctaggtgacaagagcgactccgtctcaaaaaataaataaataaaaataaaaataaaataaaatactttgacctaaagaaataatattaaattgcaggtggtacaatattccatctttacatactttagtatatgcctcttttaaaaaggcacatttccaaacatagccaaaataataggatcacacataggaaaattaaaattccttaatatcgtttaatacccagtccctagtttaattcctcccaatgtttccgaatatctttaacagctactttgtccaaaccagaatctgctcgtagaccacacattgtaactggtcgttatatccttcagtttcagtgtaatgaggagactgggccacttgtcccatagagtatcccaccttgtacctttctctgatcagttctttgtggggttatttagctaatttctctacgcctccatttcctgtaaccagacttgattagatgtaggttgaacaatttttaccaagaattggtaaattcagaggtgatattatgtactctatattgtatttaatcagatgtcaaaaactatctggttgacccaccataagtgatgctaaaactggcccctgaattgaggagatgacaaactgatcccttgattgtaaggtcatgtttaatttgtatactactactttaccatacatgaatgcccaattctctttcacctcatgtttttaacaccaatttattattgaatcagttatttcattagggtttaaaggctaacaattctttaattttgttattcttttttttttttttttttttttgagacggagtttcgctttgtcactcagctggagtgcaatggcacgatctcggctcactgaaacatccgcctcccaggttcaagcgattctccttcctcaccttcccaagtagctgggattacaggcatgtgccaccatgcctggctaattttgtatttttagtagagacagggtttctccatgttggtcaggctgatctcgaactcccaacctcaggtgatacgcctgcttcggcctcccaaagtgctgggattacaggcatgaggcaccatgcctggccaattttgttattctttctacatttattaagtagttgtttttcataaagtgggaaggaggcagaatatttgacttttctgaagtagagtcccaaatggagagatagaaaacctgctaaatttttgtgtgagcaattttaagagaaggaaaagatagggctaagacagtggagtagtgacagcagggaattctctgtatatgattgttcagcctaacttagtttattttttaggggaaaactctctttcttcacaacaaatgttagaattgacttctgttttccttattctaccttagatccattttgctgggcagcaaacagagtttaagattctcagcctacatccaggacagaaataccttgtccaggttcgctgcaaaccagaccatggatactggagtgcatggagtccagcgaccttcattcagatacctagtggtgagcgtcttggctcttttttgcttatgtccctaaatatgttttaaatggtatatttgcatataataactactaatagagaaaccattttgagccttagccagaacaatagaggtgggtttataatctttctgcccaatacgaagacattttgaaaagcagcattgcaccctggattactgtcaatggagaacaattttaggataaggctacagacatgggtctgatgccccaaggggcttgatgagcagttattatgctcccaccatcttccctattcccatcatttagaggatttggtcaaggtcatcctctagttcttccagaatttataaggcagtaccgtgtctcaaaggctcagtctctgccatggattacacttggcaccttgtctcttagtgaagacacaggatataagatagacagctccagcaaagcaccttaattcagtagcttgtgttctataagggaacaatccatcttgcatttttaaaatgctttacagcttacaaagcctgtaccttatttggtcctcccaaccctcccaggtattcagagaatatgattatcattaaaaattaaaagtgaagaaaccaaacctcagcaaagttaggagtcttttccaaaaccacacaggaaagtctagcttttctaacaacttgcctgaccaaagtatcgggctttcattggcttggcatgctggaaagggcactgaactgcaaatcaggcaggcatctagtccactcctgactcttgcttaacaaaagcacagggtctagaggcagaaagcctgagttcaaatcccagcctgcaacactatagttatgtggccattggtaaatctttctttgattcccagttttcttatcttttataacaaagcaatgtaggcaaagagtttaacaccattgatggcttttagtaagaacttaatgttagcttttattattattactgcaaacgaccatgtgaccttggatttcctctttaaggatcaattaaaaagaataatgaaaggatttttaaatttttagagtactataaaatatacgcaacatattaacatattaataatatttaaaagagaatagccctgtcattgatgatactttggattgctgttcaaatcaaaaaaatatatgaatggaggaaaacactcttgggtttaagagtttcattcattaggttggtttgtttttaatgatgctgtacgtgatcaaagctttctggctgtttgttttttagacttcaccatgaatgatacaaccgtgtggatctctgtggctgtcctttctgctgtcatctgtttgattattgtctgggcagtggctttgaagggctataggtacttcactgtctctcaacttttcctcccaatcatgatagtcaaggataatgacaaaaaaaaaaatacaaagatgatggaaacctgtagataatcctcattttagccattagatgtagtgtgtttgcccataaaaaaaatcttttatcagtgctataaaaagtagaaaaattgactcgtttcaggctgatgttctttctatgaaacagagattcctagttgtgaaacagtaaaaatctggcaagagtagctaaaatcaagagaagcaaatagtccagataatccactaacttcaaaatcagcctccttaattagctaaagttaattttaatataggcctctgtaattttattttcatcattgattgtttcatggagctgccaaaccaagtcctatctctatcacagtccctatagtggctattatactaacctttcaaaaattacaaagtcagaaatgagtcatttagccaatctcatgaattattttatagcatggtgacctgcatctttccgccagttcctgggccaaaaataaaaggatttgatgctcatctgttggaggtaagtacaggaggcaaaaaaatggagtgtgactcactgctctgtagtaattaactctacacactcacacacagtccccgtcagttcagcctggtagtttcagccagcctttttggactgtctctcctggtcagcatgtgtgttaacagaaagttgtgtgaaggatgagggtacttactttcacacactaaatgtcagagggcaaggagagaaagccaagaaaacatggaaacacatttattgatttatcagatctactcataagcatagagataaacattttatacaaataatcaatttagaaagagagtgaatattttgattaatgcaaaacagggacccaccaccaccccctcaatcatacattggtaaaagcttctacttgaatgttctttacataaagccatagtaacagaatatcccattgccattatctctcactttgggcactcagctgagaccagatcagtactgtggggccatctgtttgccaggacccatttgggctgattcaagagggaattaaataatgagtgttttgaatgaaaagagaggttagaacagttttaaatttttctccaaattgaaataaatagtttcagtttggcttttaagcttaacactgacatatataaaagcaactagctgtacattaaggcaaatacttgacccagctgctctgggtctgacagtgtaagaatagaagaattgagtcctggataatctggcttgtctgtgttcactttggttgcaaatatcgaagcagggactagagcccaggagtcccagctcctgacccagtgctcttcctccactatccagtgtagcattggcctgatagaaccagcatgaatgtctcagcaaactaaactagttactgtccagctcacaatttaacctgctagccacagagacttaacgataaaatagctacttttgtctcaaaaatatgtgttagtattcttaatgatattacctctaatcctcaaaagaaccctcccagatgggtagtattaatattattttctaccttttaaaaatggagaagctgaagttcagagagcagcttgtccaaagtcacataccctataataagtgataaagccaagacctaggtcagtacctgacccaagtcagaggataagaaaaaagaggccaggcgcggtggctcacgcctgtaatcccagcactttggaaggcagaggcgggcagatcacgaggtcaggagatcaagaccatcctggctaacatggtgaaaccctgtctctactaaaaatgtaaaaaattagccaggcgtggtggtgggcgcctgttgtcccagctactcgggaggctgaggcaggagaatggcgtgaacccgggaggcggagcttgcagtgatccgagatcatgccactgcactccagcctgggcaacagagcgagactccgtctcaaaaaaaaaaaaaaaaaaaaagaggcaagagtgagaggaggaggcaggaggaaataggagggggaaaggaaggatagaagcagggagaataataggaagggcggaaatatggaatagggtgatgaagggggagaagagaaggagggagaggaagtagagtagaagaaaacagtagattaggaagagggaggagaagggaaggggaaataagaagaggaaggagagaaggaagatgaaccacagaaggaaaagacaagaatccacttactattgccagactctagaaagtgatagaggaagttagcaggccagcaaccacacctctgccagtgggccgcagtgtcagatgcatgcataagcactgtgggtttagaagtttcacaaaccttcattttatagttatctgtttattattgtatgtgtatatactacttgcccattaaactcatgattattattgcttggagagagactacgttaaatatcctgagttgactttaaaaaaaaaaatctgctgaatagtatccagaaggtgattctagatggcctggcacacaaatgtctgaagtttgagatcttcccacctgcttgtggcaatgaacagcaccacttagcagggatgctgatttggaatgttatgaagctaacagccatctcttcttgtgtctgtgttttaatagaagggcaagtctgaagaactactgagtgccttgggatgccaagactttcctcccacttctgactatgaggacttgctggtggagtatttagaagtagatgatagtgaggaccagcatctaatgtcagtccattcaaaagaacacccaagtcaaggtatgaaacccacatacctggatcctgacactgactcaggccgggggagctgtgacagcccttcccttttgtctgaaaagtgtgaggaaccccaggccaatccctccacattctatgatcctgaggtcattgagaagccagagaatcctgaaacaacccacacctgggacccccagtgcataagcatggaaggcaaaatcccctattttcatgctggtggatccaaatgttcaacatggcccttaccacagcccagccagcacaaccccagatcctcttaccacaatattactgatgtgtgtgagctggctgtgggccctgcaggtgcaccggccactctgttgaatgaagcaggtaaagatgctttaaaatcctctcaaaccattaagtctagagaagagggaaaggcaacccagcagagggaggtagaaagcttccattctgagactgaccaggatacgccctggctgctgccccaggagaaaaccccctttggctccgctaaacccttggattatgtggagattcacaaggtcaacaaagatggtgcattatcattgctaccaaaacagagagagaacagcggcaagcccaagaagcccgggactcctgagaacaataaggagtatgccaaggtgtccggggtcatggataacaacatcctggtgttggtgccagatccacatgctaaaaacgtggcttgctttgaagaatcagccaaagaggccccaccatcacttgaacagaatcaagctgagaaagccctggccaacttcactgcaacatcaagcaagtgcaggctccagctgggtggtttggattacctggatcccgcatgttttacacactcctttcactgatagcttgactaatggaatgattggttaaaatgtgatttttcttcaggtaacactacagagtacgtgaaatgctcaagaatgtagtcagactgacactactaaagctcccagctcctttcatgctccatttttaaccacttgcctctttctccagcagctgattccagaacaaatcattatgtttcctaactgtgatttgtagatttactttttgctgttagttataaaactatgtgttcaatgaaataaaagcacactgcttagtattcttgagggacaatgccaataggtatatcctctggaaaaggctttcatgatttggcatgggacagacggaaatgaaattgtcaaaattgtttaccatagaaagatgacaaaagaaaattttccacataggaaaatgccatgaaaattgcttttgaaaaacaactgcataacctttacactcctcgtccattttattaggattacccaaatataaccatttaaagaaagaatgcattccagaacaaattgtttacataagttcctataccttactgacacattgctgatatgcaagtaagaaataatgcctccaattttttcttaaaatagtttagatatgttaagcatggattttccccctaaattctactctaaagcttctataaaatatagtttggaaataaaaatgttcttacacaaggggcaaatgaatttcatgtgaatccctttaggatgttttcctccttcatttcagcatgatagataatttattatacaccttagtctttccttagttaaaaaaaaattccctaaagactaacttgaaaagaaaaccacagcaggatgctaatggaattactgccttactgtacatacaaattctactttaatataaacccataagtttaactgtatttttgaagactatttttctatgacttaggtaaaataaaagactattttctattttcccagtacagctgtttatgtattcagtgggtacagtattttctgctgcaaggttataatgtgtatttacagtacatagtagtatataaagttcccgtttgtggagtaaaatgccataccaacccaaagcccactgtgaaatatgaagtgaatgacaaaattcagttttcaacgcaatatagtatagtttatctgattcttttgatctccaggacactttaaacaactgctaccaccaccaccaacctagggatttaggattctccacagaccagaaattatttctcctttgagtttcaggctcctctgggactcctgttcatcaatgggtgaatcttcctaaagctaccataaaaagggagggcgacgatttctaacagctgtttaaaagagagaggttttgcttttgtgagaaatcttgggccacaaaaaaattttaagcaaagccaggagttagtgtctctctgaagtaaattcaattgcaaaatcttggcagaggcagaaatggctcatatcagaagtgtccaaataaaagttctgggaaactaggtatttgcttcccagagcaatgggaatagctccaaaggtcagagtaaggtaatgagaatctcccggtcaattccagtgccaggcttcctgaaagaagtcaaagcttggatcctcattttaaagggcgcatccatgactcatctagcagcccctctctatttttcccttcacttgatggtaaatccattctatatgtccatttactagctggacatagagaacttgagctcacctctgggagttaaatattccaccccaactatcccatattgatagcaactggactcagaggtccccctcctgtttgaaagtgaacacattgccaatgttttgagaatggcaaaagcaatagatacgaagctccatttttctaatatataaacaatatcatgtgagtaagggaagcgtgtgggaaagttgtccaagctcattcagtcccctaaatcctcgatactttaactgtctgagaaccaactgcataggcatcacctgggcagtgtttgaaaattccatttgcagaatcttaagcatcagaatctgcattttactaagatccccaaatgattcaattgcacactgaagtttgagaagcattgttctagacaaccatttccactaaaggttattttagttcatagtaacaatcctcttttggaaaggacagatcaagtctgtttgacttgcaatgaacaacactgcatgtaagcaggcaaaaaaagaaacatatcagtagtttaagattcacattatgctgaatcttatatgaattcacataaaagaatgacctgcaaaactacgcacaacttctgaaaggccaaggaatataatctaccttgagagacattaaccaaagacagtcaccctcaaagccaatgcagactaaatctttcctaacatagtctattctctaagaatagagaagatatgtatcagtcactcttatagtctgaaaacctaaacataaaagtaatctgcttttgacatataattttgtataatacgtatgaaaaaatgtgacagctaaggacttgaattaaatccctaaaaaacaccaattagccactcattaagccaagactttaattctatgatcaattagcactgtttatctgaattaagcttttttgtggtctaacaaaaagtttttttgtggtctatcaaggagacagctgttcaaatggaaggatacatgtggggcaggggggcggtgaagagacctagattctggtcctaactgctttgccttggagagattaattcccccctctaagcctcagtttcctctgaagatgttggaccagataacctctaaggtcctttgaaactgactccttgattccatgactcactgaatatttttctgcaaagataatcccaaccaatgccttctatcctaatctaacaaaaaattgctcttcatcatagaaatacaaagtaatcttcagtgatgtgctctttatactttgctttttaaaccgtccattccagttggtcttaatatattgcacaagtattttataagtgaaatgtgtacagaatcatattctaagattatgtgcaaatatatgtgtagaaagaggcatttaaaaaaagaggcaggagattgagaagagacatattgaatgaggcactaatctttagaaaaatgatcttttactgaatcaagccatgctcattccttgctgaatccaacagccccaaatctcttttcttatatttggctgttaatttttttccttgcaccatcctagattgttaacaaccattgcacagttggctcatgtatccttacactctgagttataataagttgtatttttataaacaaatacctaaatattcaagttttaaggcgcatggaaactgaatctaggcaacgggtgatttgtgtagcttacaacctgaacagcaagatgttccaattcattctaacagatgtgtataagcacaagttatgtcagctgtgtcagatatttaacagatcctacatttattagctatataacagactctacattttcctaagtgcctaagaccaatcctggtagtcacttaagtacaaaagactcactttaactggcttggtctgaaggggtcaatcctttactgcctgtacaagatctgggcagttttgctctgtgtcttgtgatgacccagctgaatgtgaaaagcctatgagttattgagcaaccagaggtccctgcattccaagttgcagtttagctctggggaaactctggctttctctttcctcaagtgtccaccactgcccatcatttgcagaaagacttggccctgcctttagcaacttccctatctccttagagtagacaagaaagaaacagatttgtgcacattttacaaagtgccttcctctatttttttttaaagttttcattttgcaaggaaaaatgtattgattagaaagtaacatttgccttatagggattatatatatatatagatatagatatagatatgtatgaatggagagatgagaagaagccagaaagggcacaacaaaatggtctaagggccaaccagcaatgttcagtgaatgtttacgtattgtttaattgaatcaacacagagctgttgtgaatagtgtgacttactttgcctgataagaaattgaggctggctgtgatttggggataaacctgccaccctgtgatttgagactctccataccaaaacttattgatacatttttgaatgtcattggcttacatgcctaaacctgaagagaacaatgcatgcacattggaactttgtacacaaacagaaaaatataaatgactttgaattaccatcccaagcattgctaacgtagatgtgccattgacgaaagtctcatgtgttcttgagtgaacaaatttccttttcttcctttttggctcaagcacaataatgctgtcactgagacagtgactgagcactcaatgtccaagactaaatcacatcaccacgactaagtaggcactatgtcctgggatgagtcttttaaactctggccatcaggttccttacttgttaaataagtaggttggcctaaaaggtttctaagacctctcatgatctaggtaaaatccagggtttcaggtcagtgtccctggtgcagtgcaagaaagccttgctgacacacccttggcctgaagcagtgagcacatgagattgtgtgacaacgcttcagagaaaaacagagatctgttcctccaactcagattgatttaacatccttgcttctccttttccttcctggctttacatatttgtagggtttttactccttctccagagcctactattttcctaagagttagtagcaaccataggatccacaagaaatgaaattattcatcaacaataactttggcactgcaaaagactgagtcaaaggttaaatcagtcacacagatatccaaggccaagttgaagatcacaagtatatcccatttagagatttgcatacttagagattaagcccatgttcattaattatttagttaattcaaaagccattaataaatccatgcccagcctacgcaacatagtaagacccagtctctacaaaaattttaaaaattagccagccatggtgacacgtacctgtagtcctacacacttgggaagctgaagccagaggattgcttgagcccaggaggtcgaggctgcagtgaaccgtgattgtgtcactgcactccagcctgggtgagagagcaagaccttgtctcaataaataaacccaagttacttcgatgactagatactggaggtctgaaggagaagctttaaaaatacagattgattgcttcagagaaatcctatttataattatgatctgaacttattctatgattagcaaatatatcatctgaaaataaaacaggagttctctccccagacttttgtttttcaggatggtgagttttggtctgggaccctcatggcacccattttgataaaaggaaaaagatagtaaaacaggaaataggaagtttccagagatttgggcatctcaggattccatgaaatgctgagactaacccactaaatccaaattttattggctatggtaaatctaaatctgttcagtgttctgaacagattttatgagtttatgtctaagagtttatgtctaagagaggtacataattcacaaacactatcatgctggcagctgttttgtccacatcaattcccttgatttaatgctctgatttcaatttagaaagtactgagacatgtaaagtctcaaaataggaaaaacctatcctgtttataaggtgtggtcaataaatagaccacagataatcttagtctattaattaactctcagatcatcttagactattaattaacattctgcttgctgctgattaaaaagaaaaaaaccctaaaaccttcagcaactgaagtagtaatataaaaaataacctttaatagttatggtcaaattacgcttcacttggataaacctcaaaatgtagtctgagtttttttgtgcacagtttacaaatcctgggggaaaaatcttttttccacgttatctgaaaaactatatggcgaagataccgctgaaaaataatttgttttatgaaattcctgaaaagctaattttgaattttttaaagtaactacctcccttttgtgtcctaatgtccttccttcaaagctgcttatagtttagaaatgaaagatgtcatgtctcatgctttgactggttttcggtggcatatttgatgtatttgccaagtggcattactgactttacagtaactgttacattattttgtactatattgctttatgtggttcaaaaatagtatatgccatattgaaatatgtaatcctcatgttgtgaaactcatcatgtaatacaaatgaaaatcattacttaataacttacaatttatccatatgtagtttcaatatgattgtgtctatgactgtaaaacaaaactgaaaaaatatgtaatgtatttctgttgaaagcgtgaatgtactaattttttcctaatctttgtctagaagaaagattctatgtcattcattgtacagctgctctggggtgttacacatttaaagtacaatccaacagttgtttgaaagtcagcctctcggctttgtttcatgtgactgctgacacttctcaagtgttctttgcataatgaggctggattttgtgcttcatcgttcattttaaacaattgaaaagtctcatgtggaaaccaaagcaatctagaaccagcctgttgggtgactgtgtcttctgtaaagccatattgaagtgaagttatacataatagcataaggttccacattttcaaagctaccactacctctgcttttcctctttccctagaaaatgccaagcaaaattccccaacactaagtgagaaattagaagtaattgttttataattaagttgctgggttttttttttaacaccttctaattcatcactttgtagggttatgcaagagtttctgaataaccattcttacatgtttatattttataaaaaccggctgcaagaaagattcagaaagaatacttagtaagtcatcatatgaaaaaccaacaaaaccatagagtgcagattttttcctaactataagtcacctcatagttgtccaaagccatgataatgatatctcttacaaattgacttctgtaacccccctagaaataacccttttccttatttgattttagtcatcaaacatagtatgatatgggaaaagtcagccatttaccagaaattatcttattttgattttaaaaactcatttctatatgtagttattgtaatgtctatttttttagacttaaagatttatagaagactatagttatctgatttgttattttgcatttttcattctgtaaatctttgcttatggcacattgtgctctctgttttccatggttttattcatttatctcctcctattttgaggggacaacatgggtagttaaatctttgtcaatagtattggagataacactaactgctattatcataacatcttcatttttactgcatgccaaaaccaatgcctgccaaacaaaatcttagacatcccaatataatatgttagttatatttctattcacatcattattgaaaatacccagctcagtgcctggcttaataaatgtttaattcccttacctactcttgctctatttttttatttgaaatggagatgagcaaaataacacattcatggctgaagcaattttttggacatttcttgttaccaaaagatctataatcaggacattgtttatgtaagttggacaaaaaaaattcttcccctttatgtccacccttcctatgattgcaagacaaaatttccctcctttacctcatccctataacatgggaggctgagaaaaatgaggggagatggaaccagatacaaggagatccaataagagaagcttatttaaatattgtgaaataaaggaagaaccaaagcatttttttaagtggggaatccttttgaacagttattatttatccatattattaacaacatcttttctgacaaaatccatcagatgaagtgtaaatggataatcttttaatggatctaaacctagaaagtttcacttactgttcatgtccgtgttccagaattgtgaaatggtgtgtggttttgctttccaagttcttctctgcctcctcttaattctctaattccatgtcttacagaagaatgagaaatttctttcttacttgagtatcatgctctaaaaaacttggcttcagtcacagaaacgctggctctcctgtgcttatattgaagccaactgcctttaattcttgggccctcttatatttttaaggtgcaaaatttgaagtctcagtcaccagacacaggttctatacaattaatgatgagctggagaagtaatatgtagctaatttttcaaaagcattgaatatactttccggaaagaaaacagaaattaaatattgccacatcttgccagaatcccatctgacaccttaactttgtcaggtttcctacaacttgctaatcaagttttatacattctaaatctccccagtttctttggggctggaagatgcaacttccatttaatagaaactttgaaatcttggggtaagggagcagtggggggactagggagaaggataagaaatagaattattgaaaagcccccaccagggaccttcctggccagaatatgcagagtaattcctgctggcttcacctttgaaagtccctcgaaactatgcagatgaaactgagtctgtttttgatattgtcagatgtattctaccttggaagtcccaacacctaaactggaattcttgtatttacatctcctccactgtcccccacaccacccctcaattcctgctgcccctgctaatgttaagcatttttctcttgttatcatcaggttcacattaaaaacagatacttacaaactgacttgaagcacagatacttttacgaatgtgataaaatattttcttaagaaaaggaaagaggatgtgggtcaaataaaacaccgcatggatgttgattggtgaatactggtgtaagaaaagggagctcaggaatttttattactgtatttgtaaatgagtttgaaggaatttgtaaatgccactggtacatttttaaggtgacacatttgctccttataaagttattaaaaattacagggtaagcttaaatgacgtttgccagtagttttactttatataatcaatattgatattgttgctgaactatgtaactttatgatgcatttttcagtcccttttcagagcaaatgcttttgcaatggtagtaatgtttagtttaaattgacttaataaattattacctgagcaatggtttttggagggtctttatatatgtatgtgaaacatgcattacatgaaaaatttaacttgaaacaagttttttttctttgccacaacaaaatttattagaatagatttttttaaagaaggagggggaactgcattttaactccggaaataaagtatgcagacatatgcgaaaacatttatcttaggacactcacccatggcatttttttcaggcagaaatttttgtgctcatctttgaacacctctgagtttattttcctactaattctaaatcaaaactgaacacacatttccccagtctttattcatctgccagactcgagccttaaaaatgcaagcatgcttggaagcacccagaagtttcttggaacttctcctgggaacaacaaagaacaatcaaaaggagagtttccaaacctgagattcgatcaactttcccatgtttccaaacctgagatatgatcaactttcatttaacaagccacaaatctcaggaccaaagtttcacattttcttttgttcgtgttttcctgactggaattattcagtctttacttaaaaccagctgtgagttcatcatccatttgtgatcttttatttattgcataaaatatttcacaaatacttgaacatatatagaaaaacataacaaaggctcatttacccacatccaaatctttaaatattcatattttgccttgtctgttcctttctttaacaaagattcatttaatatcacagatgctgtatttacatccctcaacaaccaaattctctacctctctcttcagcagtaactacaatcctaaagttattacatatccttcccagctatttttaaaatgcattcacctcatatttatctatccctaaataatatgaccaattactttggtatttatgagttttgcataaaaaatagcagatatctttatgcactttgattttctttcattcggcattgggtttttgagatacaaatagctccagctgcttagttttatacatctatacaatctattaaactccctattcatcaacatttaattttcactgctttatgcatacaactgctgtggttgtatacacatatacagtttattaatctccctatttatcaacatctaattttcactgctttatgcatatagctgctgtaattgtacatatacatataatttattaatctccctatttatcagcatttaattttcattgccataaatgacaaaagttgtgtgtataccactgctataattttacacatatatactatttattaatccccctatttagcaacatttgattttcactgccataaatgactatgcaatgagcattcctatgccagtctcactggaatatgtgcaaaagtttctccaaaatatacacctagaggtggaattgttgggtcatgtaaaatgcatatcttaatatttcctagatgctgacaaattgcttcctctccaaagcagttttactgatgtgtacccttgccatcagtgtagtatttccatttctcgtcatctttatcactacctgatgcagtcagatattttaatgtttgacaattcaatgagcataaaatgatgcattgttattttactttttatttccctgatgaatccatttgtatctgagtaactcatccttttcctgcttatcttttatgccatctttgtcatcttctgagtgtctacatatgcccaaatgttagtccaggcttttctggcccatttttctgtgtatctattcctgtcctggtgctccactgttttattaccatattttatacaaagtcttgttatctggtatattaattctcacaccaccatacccttcttcaaaattgttgtggccattcttggccatttactcatcatatgaattttcagatgagcctatcgggtctcctaaaaaattgtgttgggagctagattgaatttatgttttaatgccagaagttacatctttataatattgtgcctcctaatcttgaacatggtatatcatttcctttacattgggcttcaataaaactttacattattctttataaatgtttgcatatgttttattagattcatccctaggtaccctctcattacaacctccacctcccgtgtttaagtgattctcctgcctcagcctcccgagtagctaggattacaggcccacaccaccacacccagctaattttggcatttttagtagagacgaggttttgccatgttgtgcaggttggtctcaaattcctgacctcaggtgatccgccggcctcggcctcccaaagtgctgagattacaggcgtgagccaccatgcccagtcccactgatgttttaatactgatcttgcattctgtaaccttactgaactctaattaacattcttataatttgtaggttttcttggattttcaatttttacaacggtatcaccacaagctaacaacactgtttcttcttttccagtctttatacctcttatgtctctttcttgatctattttattgggcttccaggacagtgttaaatagaaacgtgttatgggcatcctttcttcttcctgactttagtgagaatgctatgaaaagttcactattacatataaggcatcatgtaggtgttgtagaggggaaaggaaagctgccattttgccctccgagggttcactaaaagtcactgacaaaagttgaattaataggagaaaaggcatacaaatttatttgattatagttttatgtgacatgggagccttcagaatgaagacccaaagatacagaggaaactgtccatttttatgcttagtttcaacaaagtacggacagccttgtaggaaaatgattggacctaatgccgacagactgagtgagaaaacctagcaaggcctgtctgtctagatttttcttagcctctctgtgtaggaatgcctctcaccattccttccttctgggtatggggcaggaccctctctggaaagggggtcttatgacctacagtcaaacaagataggtcaggttatctacagtcagtttttacacagaaagtctggtgtaaagttatagtaatatttttagactgtaaagctgactttggggcaagagggttccagtttccatgacctgccttggggaagtgagattccagtttctatggccaggctctggagagaatgagggaccagacaggagggcagcaggtcaaagagaactgctgctgggcccctacaatttttcagatacccttagttatgtgaaagatatgcctttatatttctagtttgctaacaattttttatcttaactgattttaaaacttctcaaatttttttctacatctattgatatgttcacatggcttttctctgttaattaatgtgtaacttattacagaaaattattttagagagtatattttaaggttaaagtacccttgcattcttgagatgaacctcacttatacatgaagtatttttgcaaacattattaggttcaatttgctaaacttttatttaggatttttgcattaatgaggttcatcttttttgctgcttaagatatcgtttttggaggtgatttataagtaagttaaaatcttctaggattaagtaagtttctatttattataattctatcagtttttgctttatatattttgaagctgtattattgggcgtatatagatttaaatgttcaatcctccaaataaattattcttttcattgttacatacaatcccctttatttataatggtcacgtttgtcttaaaacctattttttctgatactgatattgctaatttggattttcctgggagtggtaattctctggtaagtttcttttcattcctttacttcctaattgttctgtgtcattatgttttaggtgtgtcttttaaaaacagcataagctagattttgttttcttctggttgagaatattttccttttggtggctaaacagttctctccttctcatttgatgcacccttccttcatttttcttttgcaatttgaattatttaaatcagccaattctgtaataatcactatagtaacaggatataattaaaggtccttgtaattaaagatccttgtgagataattcactgtaactgagagccctaagcttgggaatagctcttcccccatacaggaacaatcccagtcatagtgaaccagactctaaggattctcatctcactgtgattgaaaacaataattaagccttgattgtaaagttcaagagaatgaacaactagaaaatcccaactgctgagagaagggcctatgctcaaaaagattttgccatacattttaccaaaaagagattgagttgtattttcaggatctcccatttaaacacaaatcttccccacataaattatctgtcaatcattctaccacatacattattgaataatacttgaacactgtatgccaggcactgtgccaggtatgcagttagcagtacggatgtgctctccagcctcttggggattacagtctagtgggaaggctaaggtaatccatgtgtccctagctttctccagaatgttacttcctaaaacacggtaagtccaataattccgatgagacatgttcaaagagtcctaataaataaacaaaaggactttgaccttgcattatttttcaagaaaatcagttttccatgaaattctaagggttacagtatctgagccgcatctttaagcagttattctcttcttacacatctgctaatctctgcacctcagtctgaacactctgcacacagcattcttcataatccattaactgtgaaatggaacacctgtaatatgaagtttcatgtaaattgtataaatttatctgaaatccttccaaaacaattttcctttccttcaatttcacaactcctaaattagttaagagagggaaagaattactttggaaaagctgttaattatcttcagagccttactggactctattattgacagaggcctggggcagagcaaagttcagttacactcaggacttaactgataaatcactggtgaacctgtgtgcaaaaatcctccccgataattactaacatgacaacagaatttccaagtttccccatttgtgaagtatttttttcaaggagaaatttctatattttcctacttgatgaaaggcttctcccctgctatttaccatttgtgcaaactgagatagttcttcatcttctctagtcttatgtaaaatggagaatattatacctgatctgctcaaaggagagagaagagagactcagcaggtgtcacttataactcagaaataatatctgtttaattggagttttatctgtgaaggtagggtaggatcttggattgatattccaaatgactcctaggctgagaatgaagttctagaggcagtctaagtttcctcttcatcccagttttcagattttgtggacatcacgtaattcctcagagttcaaaagaacaaacatcttagaatatagttttgtccggccgggcgcagtggctcatgcctgtaatcccagcactttgggaggccaaggcgggcggatcacctgaggtcaggagttcgagaccagcctcaacatggagaaaccccgtctctattaaaaatacaaaattagctgggcatggagtagctgtaatcccagctacttgggaggctgaggcaggagaattgcttgaacctgggaggcggaggttgcggtgagccaagatcatgccattgcactccagcctgggcaacaagtgcgaaactctgtctcaaaaaaaaaaaaaaaaaaaaagaatgtagtttcgtgcaatgttagtttagttgaattataaattgatgtcatcttactgagatgcatttaaaatgtacacacattttgacctaggaatccttcttcaaggaacttatctgaagaaaaaaataattagtcaagtacagaaaattctctgtcctaggatgctagagaaaatacagctatccatcaaaaggaacttattaaacaaaaaatatgaagactttcagtttctgaaacagcatgtgtatacacagatagacacatgtagagaaagatttctgaaaggaaatttactgaaatataatggtcaggtttgttgtgatctttttctttcttctttatgcaattctaggcttgagtttgtttaacagaagtacatattatgttatggtaatccgaataatttattttctttttaaataaaagaggtataacctcccactttccctctagaagttattcagaatgtactgtttttcttccccactccaggtgaccccttgatgttgggtgcctctcattacaaaaatctcaaatcttacagaccaagaaaaatctcaagtcaaggaagacttgcggtgttcacaaaggcaacattgaccacagtccagtagagctgaagagcatataccagaattcaggaactcaacattttctcccctctgtccaaccacaggacagactgtgcaccccagggagatgctgtgtgtccactggcctcactgacttggattactcctgcagcacgtgaccagccagctcatatgatcactccctactgcccccaaagcagaattgactgggagctggaaacccacacaaaaagggacaattatattgaatgtaacatactccctctgcttacctagtgccttcacctcctatgggcatttggagtaaaaggttgttatgcaggtgtttgtgaaggatgtggccaagtcagttgtctcccttacagggtgacccaagattaatgatatctacccatccccagtccctcgaccccctagttgcaatcagctttgtcactgtcccccttaggcactgccatgtaaagcacgtggtcccccattctgaagcagtgggaaacctagaagagatgtactcttcgcaacctggttggatcttaaaaacatggttctaactgaaaagaaaaaagacatattacacatatttacataaattaaaactgcattcaccctaaacaatacacattttacaagaatgcgttccaacaaaaggatatatataagcatgctaaatacttgcttatggggattgaaggtaaggggaggctggagtgggataaataggaatttaagaaataatgaaaataaggcacactaactccttagctctcaaccttttgccttcctcagacacataagatgatccacagctgtccagaaccttacctagctatttggtactctcagcttttctttggaatggctccttccccattgttttctcctctctttctctaagacccccaaaaccaatttatttgttcattcacttcatgcatatcttcctttttcctctcttagtcacatacctcgtttcacaatctccgaccccttcaaccatgtcctgatccttctcccacacccagcaccaccctcctgcagagaaaagtgtacccggatgaaactccgatggaatattaaactaacagaacttgtcagatgacctttgctttatctgcctgctttctttcctcttcccttctgttctcttcttttcctttcttttctctcctcttctctctctccttcctattttcattctatctcttttcctcactctctttttctcccccttgaaggcactgttactagaaatagagagctctggggcttgcctgaagccatgggcagtcaccactccaggattccccttttagcgcctcctccccatcttaatctcaaagtccagcaggatagtgagcagttagagcccggcctccaatctgcttccatgggggttggctttctgagtgggagaaatgactctaatctggagacatttgctgagacccttgtgcctggtcacttccgctcccaggatccttgagatgcatcctttcctgagccgtaagtggaaaccagggggacgtgggtcagtagaggatcagcgagagggtaagacttgagctccgaaggctgctgcctgggattctggaatgttagacctgggtgaggtcttagagatgaggcatgtttttgacacacaggttctcaccctgagtcaatgcccattttcatagccaatattttgtaatgctcctttttgttttgaaatgaaattcgtggataatgaaacccgactatacacaatttcaacatgacatgctatctcagcttcaatatttttaaaaaccaaaggaaagcaatcaaaatagagtgtgacttcaatttacagatgcccaaggatgatttctattttttcttttttgagacagggtctccctctgtcacctaggttggagtacagtggtgtgatcatggttcactgcagccttgacctccaaggctcaaataattctcccacctcagcctcctgagtagctggaactataggcacatgccaccatgcctagctatttttcttttttaacttttgtagacatggggttttactatgttgctcaagttggtctcgaactcccgggctcaagcaatcctctcacttcagtctttcaaagtgctcggattgcaggcctaagccattgcaccaggctaggatgactattttaaaagatgtaaagcatctgcatgaattttcatcatgcctctaggaagtgagaccacgctctcaattgccaacaagtgctgtgattcacccagagtcatccaagccagggcttgaccccaggccctccccatctactcagactctcctctctgcagcaagaacagaaaatatgaggagatgtggggtaaccagacattggtggctttatgagtaatatcctatatgcttgtgattttcacatggatcttgtttcacgagagcctcacctcctcctcagcaaattccctcatgcaaacatgagattaagcaactgtctgtacatttatgtgcctgtgcttcacgggccgtaaacaggtacaggggaccattttacattccccattgtgaccaactttgccttcattttctcctcatatttccctttcaccctccttccttcctctcctcttcgctttcttacccctgaaaattgcagttttttgaaacttgacacatgcatgatgatttaaatgcattatctccttttatcttcaaccaaacttgttagtgagtactattatctcattccacaaatgaggagacaagagaataaggaatatctaagaaatgtggtcaaaggcagaaacatgtatgtgataacttgggattcaaagccaggtctatctgactccgaactcgaagagattctaccaggccctgtctatcctcccctagtcttccaatcctgtttggactgctcttttcccttggtcatgagtttcttttgccagaacatcacctaactccaacattttctcagaagcaggtaaaattataaccagtcttatgctcagtgaggaggaaattatgctgaaagtaccagctgttgacctagcaagagaaatgccctagactgccccctccccttccctaccccaacctctgaacattgtggagttgcacagtggagcagcaggtaacctagagagggcaggtgaggcctagtacctagagatcttgagcaactcgttggcgacgccttaccataggcccagcaaggacactacagggaagcagtcttggaaaaccacaccactggccgggtgcggtggctcacacctctaatcccagcactttgtgaggctgaggcgggcggatcacgaggtcaggagatcgagaccatcctggctaacacggggaaaccctgtctgtactaaaagtacaaaaaattagtcgggcatggtggcgaacgcctgtagttccagctactcaggaggctgaggcaggagaatggcttgaacccgggagtcggagcttgcagtgagcggagattgcgccactgcactccagcctgggcgacagagtgagactccttctcaaaaaaaaaaaaaaaaaaaaagaaaaaagaaaaagaaaaaaaccacactacctagactgaatgccatcctcatcacctggccttgcaaaaacctttgggacttttatgtctactttcttacctactctacctaggtctgtgcctgcttgtgcttgctcatccaaacacacactcactaacatacatttattgagcacctgccatgtgcaatatatacattcaggcaaaatatttgagcatctattatgcaccagtgctgcagacttagccacaataagcaagaaaaagctcctgccctctattccaggaaggagatagacataaatgaataagtaaatatgtaaaaatatatatgtgtgtgaatatgtatgtatttatgtatgtatccaatagagaaacatgccatgaataaaaccaaatctggaaagggaatagaaaaatataatgggggtgaggggaggggctgtgatagggaggtcaccacgttttaagtgttgttttatatgcaaaaataaataagtcacaattcttgtatagtatctacatagttactgtacaatattcatatgcataaaatgttcagctttgtttacactttgatatgcacaatcactttgggctaactgtgtatacaaagttatggaagcaatttgttttcagtacaaaagtgtggagaaatatctcagtggggcattctttcctacaattagctaatgactgaaatatataacatttgcaggtggctggggtatgtgctcccatgtaccaatttcctaatatatgcctgctctcccacaaaggaaggagggcacaaaaagtcatctatttccagctgagatgtttctccattcctgccaagcctattttaagaaaacatttaaaatttgccctaaaggggggcctcccatctacacccctccaggcagccttgccacagtcagaactgatttaacacatgccaagggccaggaagggtgatcacagagaatgcctactcccgaacgtgcggaagaagacccacccacctcagaatcaggaatcgaggagtgctcttgcttgtggacagccacaactgcccctgtgtggcttcagcaaaagggcatatactggaaggttatgaaggaatggagggaaggagggagggcagctgaaataatcaacaggaggctgaggaggtggacaggaccccacacgcaaagaagccaaggaaggccaggcaggagtagagtaacttctggtaggaaccgcctcttagcagctttgcttagcggatgcaggcacctggcattcactgccatcatccttgcacccagagcacgcatgggacagaggggacctccacagagaaggctgtgagagatcatgtccggagcggatgataccgaacagcaatggtgagggtcctcagcagcgtgctgcagactgcggccccatgtgtgaagagaaaacgaccactctggagtctccaagctggcagctccagcacagagaagcagaggagaaaaatttctctaccgaccagacactgtccctcaggcgtccaaaccccaacacagcttcagcaggcctccatgggaggcagtgtctcaaacgtcaatatcagtgagggacttcaaaactgccaaggcctcgaattccatctgtcactgatgtcctctaaggtggatggaggatgaaatcttcctttcctaactcgttggcaatcccaagtatcaaatgagattgcaaatgtgacaaggtttttttcaagttacctaagatgctatacagaaatgagatacaattggcattttgggccaggcttagtggttcacgcctgtaatcacaacacttccagaggccaaggcagacagatggcttgatctcacaagtttgagatcagcctgggcaatctggagaaacccgatctctactaaaaatacaaaacactagccgggtgtggtggcatgcccctatggtcccagctactaaggaggctgagatagaaggatcgcttgagcctgagaggtagaggttgcaatgagcagagattccaccactgcactccatgtaagaccccatgtctattaaaagtaggaaaagaaaaatagctgggcatggtggctggtgcctatggttccagctactcaagaggctgaggtgggagaattgtttgagcctgggaggccgaggctacagtaagccatgctcacaccactgtactccagcctgggtgacagaaggagatcctgtctcaaaaaagaaaaaaagaaagaaatcatccctgggcatctgtaaattaaagccataatttattttgaaagcttttctttgatttttaaaattattgcagctgagatagcatgtcattattttcacacattatatgagcattgggcaacagagccagacctgtctcagtaataataataattagcattttaataaatcacactgtgtccactgcatattttcaaatattttagaatctttttttcattttaaagggtgaggaagcccttaataaatactccctctgggctgaaaactggttgtgaatactgaaaaactcgttatcattacaaagagaattttccctagagtttccaaatgccaaaaaaatttgatttttctcatttactttgcccaacagtttttgtcattcgatattatgattttggggaaagaaaataaagttgcagtgaactgtctgctatagaactctgtgagaattaggcagcttggaaatgaaagctcactagttacccacttggcatttattatgcaaaagcgatgctgttctccaaattgaattccatctttcaatgtctcaagttgctcatgtgaattgaagtgaaaactggtgaattggatgaaaatcattagctgtcgtctggttagcctaaaaaggcactatccgattagttaaaacaataagacaaaacaaaacaaatacctattcagaaatagaccttggatatagttttattaatcctaatctcattcattccttcccctccacctccatctcttacacacacacacacacacacacacacacacacacaggtatgcatatgcatatatacacatacacactttccaggagcccccaaaaaagctttatgaaccctcaactcttacatcatcctcaaaacacaggctattttgaataaaaattgcatgcaattatctagatagattttcattttttttctggcaaataataaaaaccaaagtagttttgtttctttctgtccatcaaatatcaacattattactattatttttgagttttagttatttattaagaggagtgatatgacagtcaatagatttggaggtattatccaggtttatttcacttactgactcctattattctttctcctacttgctcattactgtctctatttcttccttcctctttcttctttctttcctccttctttcctttcttcctcttctttcttccttgcagaatttcacgtatttcatttgaagccctcactccaccatcatgtgcttatgacttttgtgaataaatgaatgaataaaactgccttgactgtttaaaattcaagcttttctttgtcaagtatttctctccaactcccttccccctccagcctactttcataaatcctataaccttggagtcaagacagcttacaacctcctcaatgggcaactccaattttgcagatagaaaaatgagactgaagaaacgaaaggatttttgaattcttagagacactcagaattttttttccatctcagaagcacaacgaatgcagagagacacaatgaaaagctttttaaaaggtgaaattctcagaaaactaaagctatcaatttttttggtcctttctatgcatggataaccaaaagtcacttgcttttcaagtaaaagcaaattaatgacattagtgattatatatctctttgaaatatatatctctttgaatatatctctttgaaagaagatatattcagaactgttactttccatcttcatttaaaaacacaattgttcattatgtttctcaggactgtgacttcatagccacacaaagcactaacacttctttcatgcattcaaaccttcatgctgagaaagagacataatttccttagctctctccacctataaaattatcttaatgttgaccttcagtcttcaaaattaggagcatctttcctaggagtacttataaggtctctagacaactcttccagctctgacgttctgattccattattccatcccactgctgcaggggggccaaagtctgtgctggcagggaagggtggaaatggttgaggaatgagcaaaacagactactgggctaggagtcagaggagttttgttcccgttcttcacctaactagcttgataaccttaaacagattaatttaccactttacgctggtttccttatctataaagtatgcattttgacacacacacacacacaaatgtaaggtccctcctagctccaaatatttaatgaatctggttcagcttatccctgtttcatcacagtcttatgttggcagcctttttttttttttttttttttttggcggggggaggttttgtcttctgggtctatttgcatgtatttattagtctagtatattgtctaacacctgcctctcctcattccctacaagaatagtcaacagtcattaatgccgtgtgtattgagagctaaccaggtaccaggcactggctacacactagaattcaggcactaggcagcttgaagcctaaaaagcacctctattaacaggggatggactccaacaacgcattgcactagcagaagttttgcctactgatgagagaatcgacacggtgagggtaacatggagagtttgcctaaactgagcctcccaagtttgtgagggactgccgtagattttttttccagactatatttgagaagaactatttttttcctccagaaaactcattattgagatactcagattttaaatccaaactaaaagctgattagcatgattttttaactaagaaataaaattatctaagcagttttatttggataactataggtgactttcacaaacagacctatgtcatgcttagttgaggattctaactcacttcactttcagtaggtacttcccggacatcagtaaccaagctcagtcttcatacaaagcccagaatgcctccatgtgacttcatgcctgaaagataccaggtgagattcagggctttaagaaaactcaaagaggtagtttctctggggaggtctcaaatgattgtttccttaagaatgacacaaaaatagccctgcttgccactaaactacctcattccagatattgtacctctaagtcattggaagcatctgaaaccctcttaatcccttaatgctagtgtataaattggtgtccatgtgtgagagatagagacacagacagaggcaaagaaagtacaagaagcacactacacatgataattaatatatgtactgcagggagatatacacacatcacaaatgtgatggcacacataggctttaaagtaaatgttgctcctgttttaactgactcatgtggccatctgaccttcctgggtactccagcaaaaattatagttatatttttgttctcaggctaataaaaattcagctggcattttctctctcactttctctctctttctttctttctctctctttctttctccctctctctctctctctctctgttatgcatgcacatgtgcatgcacacacacacggcaactcctttattcgacatggtacttacaggttagaaattgtagaatcaataggtatttatgagggatccacaaagaagagaaatacaggagagatattttataaataaagatacaaacacgactagcacttcattgtattttaattttttaaaacactaccacaacaaaaatgacttattagttcagactaattgcttattagttcagacatttacttccgaagtctatttttttcatagttaaaatcaactcagagccaaggcttttcattgctaggtagaaattccagcccttttctgaaaagagatcgaaaggctacaaataataattcacctccttaagagaaaaggctttaatttcttgcagggacgatattgggtaagtacacgcacttctgagcctctacaggccagcagccctcttctctgtccactagagagcctgggctctgttactcatagattgactgctattgatcttgtaagaagtgtgtgggtttaaatcttgtttatctacagtcccttggctacaaccgtgtcctggaaatccacaaggaacatctttctcctgtggtgacggcatatttccagaaacccctgctgctccaccaggggcacatggagtggctctttgatgctgaaggaaacagatacctggatttcttttccgggattgttactgtcagtgttggccattgccacccgtgagtatccttaaaatctggagatttttattc

SEQ ID NO: 97 - DNA, 749 bp, Homo sapiens
atgagtacccgtggctttgtgacagtgcctgtgtgctacacaacagagcagaaagccagccctgcccttcttaccagtgaggtatggattagccacgcaacgaccagtctctttccacacaatggagcttcatgtcctcgtgcaggaagtactcatcgactgatgtggcagactttgctccctggcaaaagtgagtacccatggcgagctgaggccgcctccgacggcgcgcggcaggggctgcgcgggcggccgctctccgggatgcgggttcgaggcccgcgtgctgaaggggagagcggggccaccggcgcgggctcctggagagaacgccagccaggagccagagtcggcagccggcggggaagcccgggatccgcccgcctcccgcccggatgtcccttctcagaggggctaaaaaatactcttaaggtgctttgcctccaccactgcccccaaccccagcttttacaaactgcactcggctcgcattcgcctttgtcaaaggcatcttcacctgtatccttgagcatgagtttcggcgttgattgtgggattctcagaatgcaaattatttgcgtcaaaataaaaagaaaagaaaaaaagagcggggagggggaaggggcgcagacaggtgatgtgatgaaagccggactcgagactctcccatcagcagcagccgccgccgcagcagcctcgcgggcatccggcggggaaagtttagggttagcaatgctgacctgaaaggt

SEQ ID NO: 98 - protein, 243 aa, Homo sapiens [sequence omitted]

SEQ ID NO: 99 - DNA, 291 bp, Homo sapiens
atgtcagtccattcaaaagaacacccaagtcaaggtatgaaacccacatacctggatcctgacactgactcaggccgggggagctgtgacagcccttcccttttgtctgaaaagtgtgaggaaccccaggccaatccctccacattctatgatcctgaggtcattgagaagccagagaatcctgaaacaacccacacctgggacccccactcccagctcctttcatgctccatttttaaccacttgcctctttctccagcagctgattccagaacaaatcattatgtttcc

SEQ ID NO: 100 - protein, 97 aa, Homo sapiens [sequence omitted]

SEQ ID NO: 101 - DNA, 1425 bp, Homo sapiens
ggaccggggagcggaggctgaaatccccagacgccggttttctgggctgggctttctgccttactcactccttctccctctttctggattttaccgaccgttcgcgaaacagctttccacacaatggagcttcatgtcctcgtgcaggaagtactcatcgactgatgtggcagactttgctccctggcaaaactaaagaactctcctattcatggaggcgaacactgaggatgctttccacatgaaccctgaagtgaacttctgatacatttcctgcagcaagagaaggcagccaacatgaaggaaaatgtggcatctgcaaccgttttcactctgctactttttctcaacacctgccttctgaatggacagttacctcctggaaaacctgagatctttaaatgtcgttctcccaataaggaaacattcacctgctggtggaggcctgggacagatggaggacttcctaccaattattcactgacttaccacagggaaggagagacactcatgcatgaatgtccagactacataaccggtggccccaactcctgccactttggcaagcagtacacctccatgtggaggacatacatcatgatggtcaatgccactaaccagatgggaagcagtttctcggatgaactttatgtggacgtgacttacatagttcagccagaccctcctttggagctggctgtggaagtaaaacagccagaagacagaaaaccctacctgtggattaaatggtctccacctaccctgattgacttaaaaactggttggttcacgctcctgtatgaaattcgattaaaacccgagaaagcagctgagtgggagatccattttgctgggcagcaaacagagtttaagattctcagcctacatccaggacagaaataccttgtccaggttcgctgcaaaccagaccatggatactggagtgcatggagtccagcgaccttcattcagatacctagtgacttcaccatgaatgatacaaccgtgtggatctctgtggctgtcctttctgctgtcatctgtttgattattgtctgggcagtggctttgaagggctatagcatggtgacctgcatctttccgccagttcctgggccaaaaataaaaggatttgatgctcatctgttggagaagggcaagtctgaagaactactgagtgccttgggatgccaagactttcctcccacttctgactatgaggacttgctggtggagtatttagaagtagatgatagtgaggaccagcatctaatgtcagtccattcaaaagaacacccaagtcaaggtgaccccttgatgttgggtgcctctcattacaaaaatctcaaatcttacagaccaagaaaaatctcaagtcaaggaagacttgcggtgttcacaaaggcaacattgaccacagtccag

SEQ ID NO: 102 - protein, 374 aa, Homo sapiens
MKENVASATVFTLLLFLNTCLLNGQLPPGKPEIFKCRSPNKETFTCWWRPGTDGGLPTNYSLTYHREGETLMHECPDYITGGPNSCHFGKQYTSMWRTYIMMVNATNQMGSSFSDELYVDVTYIVQPDPPLELAVEVKQPEDRKPYLWIKWSPPTLIDLKTGWFTLLYEIRLKPEKAAEWEIHFAGQQTEFKILSLHPGQKYLVQVRCKPDHGYWSAWSPATFIQIPSDFTMNDTTVWISVAVLSAVICLIIVWAVKGYSMVTCIFPPVPGPKIKGFDAHLLEKGKSEELLSALGCQDFPPTSDYEDLLVEYLEVDDSEDQHLMSVHSKEHPSQGDPLMLGASHYKNLKSYRPRKISSQGRLAVFTKATLTTVQ

SEQ ID NO: 103 - DNA, 1101 bp, Homo sapiens
ggaccggggagcggaggctgaaatccccagacgccggttttctgggctgggctttctgccttactcactccttctccctctttctggattttaccgaccgttcgcgaaacagctttccacacaatggagcttcatgtcctcgtgcaggaagtactcatcgactgatgtggcagactttgctccctggcaaaactaaagaactctcctattcatggaggcgaacactgaggatgctttccacatgaaccctgaagtgaacttctgatacatttcctgcagcaagagaaggcagccaacatgaaggaaaatgtggcatctgcaaccgttttcactctgctactttttctcaacacctgccttctgaatggacagttacctcctggaaaacctgagatctttaaatgtcgttctcccaataaggaaacattcacctgctggtggaggcctgggacagatggaggacttcctaccaattattcactgacttaccacagggaaggagagacactcatgcatgaatgtccagactacataaccggtggccccaactcctgccactttggcaagcagtacacctccatgtggaggacatacatcatgatggtcaatgccactaaccagatgggaagcagtttctcggatgaactttatgtggacgtgacttacatagttcagccagaccctcctttggagctggctgtggaagtaaaacagccagaagacagaaaaccctacctgtggattaaatggtctccacctaccctgattgacttaaaaactggttggttcacgctcctgtatgaaattcgattaaaacccgagaaagcagctgagtgggagatccattttgctgggcagcaaacagagtttaagattctcagcctacatccaggacagaaataccttgtccaggttcgctgcaaaccagaccatggatactggagtgcatggagtccagcgaccttcattcagatacctagtggtgaccccttgatgttgggtgcctctcattacaaaaatctcaaatcttacagaccaagaaaaatctcaagtcaaggaagacttgcggtgttcacaaaggcaacattgaccacagtccag

SEQ ID NO: 104 - protein, 268 aa, Homo sapiens
MKENVASATVFTLLLFLNTCLLNGQLPPGKPEIFKCRSPNKETFTCWWRPGTDGGLPTNYSLTYHREGETLMHECPDYITGGPNSCHFGKQYTSMWRTYIMMVNATNQMGSSFSDELYVDVTYIVQPDPPLELAVEVKQPEDRKPYLWIKWSPPTLIDLKTGWFTLLYEIRLKPEKAAEWEIHFAGQQTEFKILSLHPGQKYLVQVRCKPDHGYWSAWSPATFIQIPSGDPLMLGASHYKNLKSYRPRKISSQGRLAVFTKATLTTVQ

SEQ ID NO: 105 - DNA, 2420 bp, Homo sapiens
tgaactctctaccttgtcatctgaggacctctggtggtggaaattttcccagcgtgtgtgaattgatgtttctgtgccaagccatccaaccctgttacattttcctacattcctttcctcctattttgtcattcacattaagcaaggagcaacaatcagttgcaaatacccagaataaagtggtggatgtgcctgaccagactgccatttcacaaaagttacctgctaccttctcttccagtgaacttctgatacatttcctgcagcaagagaaggcagccaacatgaaggaaaatgtggcatctgcaaccgttttcactctgctactttttctcaacacctgccttctgaatgttcagccagaccctcctttggagctggctgtggaagtaaaacagccagaagacagaaaaccctacctgtggattaaatggtctccacctaccctgattgacttaaaaactggttggttcacgctcctgtatgaaattcgattaaaacccgagaaagcagctgagtgggagatccattttgctgggcagcaaacagagtttaagattctcagcctacatccaggacagaaataccttgtccaggttcgctgcaaaccagaccatggatactggagtgcatggagtccagcgaccttcattcagatacctagtgacttcaccatgaatgatacaaccgtgtggatctctgtggctgtcctttctgctgtcatctgtttgattattgtctgggcagtggctttgaagggctatagcatggtgacctgcatctttccgccagttcctgggccaaaaataaaaggatttgatgctcatctgttggagaagggcaagtctgaagaactactgagtgccttgggatgccaagactttcctcccacttctgactatgaggacttgctggtggagtatttagaagtagatgatagtgaggaccagcatctaatgtcagtccattcaaaagaacacccaagtcaaggtatgaaacccacatacctggatcctgacactgactcaggccgggggagctgtgacagcccttcccttttgtctgaaaagtgtgaggaaccccaggccaatccctccacattctatgatcctgaggtcattgagaagccagagaatcctgaaacaacccacacctgggacccccagtgcataagcatggaaggcaaaatcccctattttcatgctggtggatccaaatgttcaacatggcccttaccacagcccagccagcacaaccccagatcctcttaccacaatattactgatgtgtgtgagctggctgtgggccctgcaggtgcaccggccactctgttgaatgaagcaggtaaagatgctttaaaatcctctcaaaccattaagtctagagaagagggaaaggcaacccagcagagggaggtagaaagcttccattctgagactgaccaggatacgccctggctgctgccccaggagaaaaccccctttggctccgctaaacccttggattatgtggagattcacaaggtcaacaaagatggtgcattatcattgctaccaaaacagagagagaacagcggcaagcccaagaagcccgggactcctgagaacaataaggagtatgccaaggtgtccggggtcatggataacaacatcctggtgttggtgccagatccacatgctaaaaacgtggcttgctttgaagaatcagccaaagaggccccaccatcacttgaacagaatcaagctgagaaagccctggccaacttcactgcaacatcaagcaagtgcaggctccagctgggtggtttggattacctggatcccgcatgttttacacactcctttcactgatagcttgactaatggaatgattggttaaaatgtgatttttcttcaggtaacactacagagtacgtgaaatgctcaagaatgtagtcagactgacactactaaagctcccagctcctttcatgctccatttttaaccacttgcctctttctccagcagctgattccagaacaaatcattatgtttcctaactgtgatttgtagatttactttttgctgttagttataaaactatgtgttcaatgaaataaaagcacactgcttagtattcttgagggacaatgccaataggtatatcctctggaaaaggctttcatgatttggcatgggacagacggaaatgaaattgtcaaaattgtttaccatagaaagatgacaaaagaaaattttccacataggaaaatgccatgaaaattgcttttgaaaaacaactgcataacctttacactcctcgtccattttattaggattacccaaatataaccatttaaagaaagaatgcattccagaacaaattgtttacataagttcctataccttactgacacattgctgatatgcaagtaagaaat

SEQ ID NO: 106 - protein, 590 aa, Homo sapiens
MFLCQAIQPCYIFLHSFPPILSFTLSKEQQSVANTQNKVVDVPDQTAISQKLPATFSSSELLIHFLQQEKAANMKENVASATVFTLLLFLNTCLLNVQPDPPLELAVEVKQPEDRKPYLWIKWSPPTLIDLKTGWFTLLYEIRLKPEKAAEWEIHFAGQQTEFKILSLHPGQKYLVQVRCKPDHGYWSAWSPATFIQIPSDFTMNDTTVWISVAVLSAVICLIIVWAVKGYSMVTCIFPPVPGPKIKGFDAHLLEKGKSEELLSALGCQDFPPTSDYEDLLVEYLEVDDSEDQHLMSVHSKEHPSQGMKPTYLDPDTDSGRGSCDSPSLLSEKCEEPQANPSTFYDPEVIEKPENPETTHTWDPQCISMEGKIPYFHAGGSKCSTWPLPQPSQHNPRSSYHNITDVCELAVGPAGAPATLLNEAGKDALKSSQTIKSREEGKATQQREVESFHSETDQDTPWLLPQEKTPFGSAKPLDYVEIHKVNKDGALSLLPKQRENSGKPKKPGTPENNKEYAKVSGVMDNNILVLVPDPHAKNVACFEESAKEAPPSLEQNQAEKANFTATSSKCRLQLGGLDYLDPACFTHSFH

SEQ ID NO: 107 - DNA, 1344 bp, Homo sapiens
ggaccggggagcggaggctgaaatccccagacgccggttttctgggctgggctttctgccttactcactccttctccctctttctggattttaccgaccgttcgcgaaacagctttccacacaatggagcttcatgtcctcgtgcaggaagtactcatcgactgatgtggcagactttgctccctggcaaaactaaagaactctcctattcatggaggcgaacactgaggatgctttccacatgaaccctgaagtgaacttctgatacatttcctgcagcaagagaaggcagccaacatgaaggaaaatgtggcatctgcaaccgttttcactctgctactttttctcaacacctgccttctgaatggacagttacctcctggaaaacctgagatctttaaatgtcgttctcccaataaggaaacattcacctgctggtggaggcctgggacagatggaggacttcctaccaattattcactgacttaccacagggaaggagagacactcatgcatgaatgtccagactacataaccggtggccccaactcctgccactttggcaagcagtacacctccatgtggaggacatacatcatgatggtcaatgccactaaccagatgggaagcagtttctcggatgaactttatgtggacgtgacttacatagttcagccagaccctcctttggagctggctgtggaagtaaaacagccagaagacagaaaaccctacctgtggattaaatggtctccacctaccctgattgacttaaaaactggttggttcacgctcctgtatgaaattcgattaaaacccgagaaagcagctgagtgggagatccattttgctgggcagcaaacagagtttaagattctcagcctacatccaggacagaaataccttgtccaggttcgctgcaaaccagaccatggatactggagtgcatggagtccagcgaccttcattcagatacctagtgacttcaccatgaatgatacaaccgtgtggatctctgtggctgtcctttctgctgtcatctgtttgattattgtctgggcagtggctttgaagggctatagcatggtgacctgcatctttccgccagttcctgggccaaaaataaaaggatttgatgctcatctgttggagaagggcaagtctgaagaactactgagtgccttgggatgccaagactttcctcccacttctgactatgaggacttgctggtggagtatttagaagtagatgatagtgaggaccagcatctaatgtcagtccattcaaaagaacacccaagtcaagagagagaacagcggcaagcccaagaagcccgggactcc

SEQ ID NO: 108 - protein, 347 aa, Homo sapiens
MKENVASATVFTLLLFLNTCLLNGQLPPGKPEIFKCRSPNKETFTCWWRPGTDGGLPTNYSLTYHREGETLMHECPDYITGGPNSCHFGKQYTSMWRTYIMMVNATNQMGSSFSDELYVDVTYIVQPDPPLELAVEVKQPEDRKPYLWIKWSPPTLIDLKTGWFTLLYEIRLKPEKAAEWEIHFAGQQTEFKILSLHPGQKYLVQVRCKPDHGYWSAWSPATFIQIPSDFTMNDTTVWISVAVLSAVICLIIVWAVKGYSMVTCIFPPVPGPKIKGFDAHLLEKGKSEELLSALGCQDFPPTSDYEDLLVEYLEVDDSEDQHLMSVHSKEHPSQEREQRQAQEARDS

SEQ ID NO: 109 - DNA, 2736 bp, Homo sapiens
ggaccggggagcggaggctgaaatccccagacgccggttttctgggctgggctttctgccttactcactccttctccctctttctggattttaccgaccgttcgcgaaacagctttccacacaatggagcttcatgtcctcgtgcaggaagtactcatcgactgatgtggcagactttgctccctggcaaaactaaagaactctcctattcatggaggcgaacactgaggatgctttccacatgaaccctgaagtgaacttctgatacatttcctgcagcaagagaaggcagccaacatgaaggaaaatgtggcatctgcaaccgttttcactctgctactttttctcaacacctgccttctgaatggacagttacctcctggaaaacctgagatctttaaatgtcgttctcccaataaggaaacattcacctgctggtggaggcctgggacagatggaggacttcctaccaattattcactgacttaccacagggaaggagagacactcatgcatgaatgtccagactacataaccggtggccccaactcctgccactttggcaagcagtacacctccatgtggaggacatacatcatgatggtcaatgccactaaccagatgggaagcagtttctcggatgaactttatgtggacgtgacttacatagttcagccagaccctcctttggagctggctgtggaagtaaaacagccagaagacagaaaaccctacctgtggattaaatggtctccacctaccctgattgacttaaaaactggttggttcacgctcctgtatgaaattcgattaaaacccgagaaagcagctgagtgggagatccattttgctgggcagcaaacagagtttaagattctcagcctacatccaggacagaaataccttgtccaggttcgctgcaaaccagaccatggatactggagtgcatggagtccagcgaccttcattcagatacctagtgacttcaccatgaatgatacaaccgtgtggatctctgtggctgtcctttctgctgtcatctgtttgattattgtctgggcagtggctttgaagggctatagcatggtgacctgcatctttccgccagttcctgggccaaaaataaaaggatttgatgctcatctgttggagaagggcaagtctgaagaactactgagtgccttgggatgccaagactttcctcccacttctgactatgaggacttgctggtggagtatttagaagtagatgatagtgaggaccagcatctaatgtcagtccattcaaaagaacacccaagtcaaggtatgaaacccacatacctggatcctgacactgactcaggccgggggagctgtgacagcccttcccttttgtctgaaaagtgtgaggaaccccaggccaatccctccacattctatgatcctgaggtcattgagaagccagagaatcctgaaacaacccacacctgggacccccagtgcataagcatggaaggcaaaatcccctattttcatgctggtggatccaaatgttcaacatggcccttaccacagcccagccagcacaaccccagatcctcttaccacaatattactgatgtgtgtgagctggctgtgggccctgcaggtgcaccggccactctgttgaatgaagcaggtaaagatgctttaaaatcctctcaaaccattaagtctagagaagagggaaaggcaacccagcagagggaggtagaaagcttccattctgagactgaccaggatacgccctggctgctgccccaggagaaaaccccctttggctccgctaaacccttggattatgtggagattcacaaggtcaacaaagatggtgcattatcattgctaccaaaacagagagagaacagcggcaagcccaagaagcccgggactcctgagaacaataaggagtatgccaaggtgtccggggtcatggataacaacatcctggtgttggtgccagatccacatgctaaaaacgtggcttgctttgaagaatcagccaaagaggccccaccatcacttgaacagaatcaagctgagaaagccctggccaacttcactgcaacatcaagcaagtgcaggctccagctgggtggtttggattacctggatcccgcatgttttacacactcctttcactgatagcttgactaatggaatgattggttaaaatgtgatttttcttcaggtaacactacagagtacgtgaaatgctcaagaatgtagtcagactgacactactaaagctcccagctcctttcatgctccatttttaaccacttgcctctttctccagcagctgattccagaacaaatcattatgtttcctaactgtgatttgtagatttactttttgctgttagttataaaactatgtgttcaatgaaataaaagcacactgcttagtattcttgagggacaatgccaataggtatatcctctggaaaaggctttcatgatttggcatgggacagacggaaatgaaattgtcaaaattgtttaccatagaaagatgacaaaagaaaattttccacataggaaaatgccatgaaaattgcttttgaaaaacaactgcataacctttacactcctcgtccattttattaggattacccaaatataaccatttaaagaaagaatgcattccagaacaaattgtttacataagttcctataccttactgacacattgctgatatgcaagtaagaaat

SEQ ID NO: 110 - protein, 618 aa, Homo sapiens
MKENVASATVFTLLLFLNTCLLNGQLPPGKPEIFKCRSPNKETFTCWWRPGTDGGLPTNYSLTYHREGETLMHECPDYITGGPNSCHFGKQYTSMWRTYIMMVNATNQMGSSFSDELYVDVTYIVQPDPPLELAVEVKQPEDRKPYLWIKWSPPTLIDLKTGWFTLLYEIRLKPEKAAEWEIHFAGQQTEFKILSLHPGQKYLVQVRCKPDHGYWSAWSPATFIQIPSDFTMNDTTVWISVAVLSAVICLIIVWAVKGYSMVTCIFPPVPGPKIKGFDAHLLEKGKSEELLSALGCQDFPPTSDYEDLLVEYLEVDDSEDQHLMSVHSKEHPSQGMKPTYLDPDTDSGRGSCDSPSLLSEKCEEPQANPSTFYDPEVIEKPENPETTHTWDPQCISMEGKIPYFHAGGSKCSTWPLPQPSQHNPRSSYHNITDVCELAVGPAGAPATLLNEAGKDALKSSQTIKSREEGKATQQREVESFHSETDQDTPWLLPQEKTPFGSAKPLDYVEIHKVNKDGALSLLPKQRENSGKPKKPGTPENNKEYAKVSGVMDNNILVLVPDPHAKNVACFEESAKEAPPSLEQNQAEKANFTATSSKCRLQLGGLDYLDPACFTHSFH

SEQ ID NO: 111 - DNA, 57134 bp, Mus musculus
  misc_feature (1)...(57134): n = A,T,C or G
agagattaggacagctattttctgaagcttaaaagaggaatacaaaagtaaattaaaataatagcagaacagcaaaggcaatcatcttacgttcctgagctagagagggagatagcccagataaacacagtgcaccaatgttggtaactgtatgcaacctagaaaagatgtcggtgaagcacacagtcttgagaaagccatttgtgaaatgataatgaaaggtcagcgtacaaggaaaaccatcttggagctgagatggaaggaaggaccatccagagactgccccacccggggatccatcccataaacagccaccaaacgcagacactattgtacatgccaacaagattttgctgacaggaccctgaaatagctctctcttgtgaggctatgcaaatacagaagtggatgctcacagtcatctattggatggaacacagggcccccaatgaaggaactagagaaagttcccaaggagctgaaggggtctgcaaccctctaggaggaacaaaaatatgaactaaccagtacccctagagctcatgtctttagctgcatatgtagcagaagatggcctagttggccatcgttgggaggagaggcccttggtcttgcgaagattatatgcccccagtacaggggaatgccagggtcaggaagcaggagtgggtgggttggggagcagggcgggggaagggtataggggactttcgggatagcatttgaaatgtaaatgaagaaaatgcctaattagaaaaaaagaaaaaccataatcaaatcattagtatttaacaggcttccattcactgagggagaaaactgggactgagaaggttaaatactatgctcagctagtgaaataattgaattagaacacaagtccctttggtctgtcctcagaggaagaaaacattcccatgaacagggacacaggcagtctaacaaagggaaccttccagcttctttctccctgctcccggtgcaccacccagctatcccactctctctgtaagtgactaatgctcccttctacagaaaactgtctgtacacctgtctctgctttgactaaagtgccctacactctaacctaggcccgggctctgttgtcttctctcccaactccaactccatgatacctttttaactccacagatctcacttcagtcttcccttcttgccctccagtgtctccttctagcttcccctcagcatctgctgacagggaaaggctgtgcaggcagagggtacctatccccctctacgggaactgcatgggctgtcagagataaactccctcagtccccctcacccactcacacctcactgccccagcaatttctctcacatcatctctcatccagggccctagaccagctttggtagtcttagtttgtcatttggggatagtccacaggctaatgctgagagtatggactatgccttataccaacccttccagagggacagtgtctttctggtagggagtgatctggaaaacagttttagtggtatgcaggcaagtattttacttcatatttatttttgtaggtattttctattttttggtaaggaatgttgacttttccattttcgactatcacgtgatgtcttattttaagaataaaatgagtggggaaacaagtaagttgattgttaaaaatacattttactggaacatgtctttaatatatactgtggtcaattgtgcgatgtacacacatgtgtgggcaaaacactcgtgcacattaaataagtaaatctgaaaggaaagaagaagaaataagtgatgtgagcttcacattttgtcgtcaggtggccagttgtcctttttagccaggcctcctgatgattacagaaagatgatgcttctatcagttgggcatatggtatggatacttacccatatggatggcttatgctgagtaatttatagtcagcccgtcagccaatctttcccaacagaggcggcacaggacgatcatgtcttaagtagtgcctacctgagactaaaccccatcaacagcaggtgagcgctcatgaagacaatgcttctcattcctctgcatgccagtacatgcatggagtcctggaatgtctctgtgtttagtgcagtctcatatacagaaatggcaggggcaggatgctcacctgggtgttgaagtctggggctgcagaaaagctatttcccccacctgtctgctgcagccccttcccgccacctctctccctgctagctgcatctcagtttctgaatgttcttctcattatcatttccatgttattggatcacaaggatcttggtgtgctggttttcatggtaggagaatttggaagattgaatagcttctttcacatctcaggggctgggcattcagccctcatctgtcaggctctggggaacttttctttgggccgtgctgtcccttcaggacatgcttgtacacaaagaagctcaggaaaggacacagaatccagctaatttatcttcacatagtttgacttgtaaagccatggtgggactaacaatgtgtactttggatctggctttcagttatgctaaatacattgcaagcaaacatagtctcttcatcctgtgggaaatataatcttccaaaggtgaaaatgcctgtatgatcctcactgcagattacttgcaaagttaaagttcttccttttccctgtctatgaacataaatacatttttttttcacaactgagattttattgaggagcagtgtacacagacattttaatttttttttgtttgtttgttttcaagacagggcttctctgtatagccctggctgtcctggaactcactttgtagaccaggctggcctcgaactcagaaatccgcctgtctctgcctcccaagtgctgggatcaaagttgtgcaccaccactggctggctagacattccaattcttaacacacatacccaaactttgaagagatgtatatttattatgttcacgtaccctaactctgaagagtcacatcgtgttcatgtacacaaatgaagagccatgccacgtattgtttctcgttgaacttattccagttcctgcctcaaacttggcaagtttccttaagacctcacatgacacacacacaacatacacaaaatttctgtctttcacagcacattatcacaactgttagggaaatgaactcccacgaccacagacattacagttctgacaggggaaggaacaaggagtggtttccttaggaaacagttctactagagacacgagaccagatattactgaaaatattccagacatgaatgcatgactgagactccaaattgccatttagtatgctttgtattgtaggatatgaaactagacccttctacagaatgttatagtgaccctggagacagtcatagcctctcctgattcaataccctgctattttctggttgtaccaaaaaaaaaaaaatttacacttttaaaatgggatgaggtgggattccctcaccttttaaaaatgtttctagagctactataaaattcgcgtttacaaaatcgttgataaaacgattcctcctgattgtacaagaagggaggggcgaggacgaatgacagatgtgatgaatgctagatcagtcttggcttctttctcttcgtctgaggctggactatggttttctgtctcttccttttctgcaggcagatctatagtttgctggtcactttgcctcttgctctcctcttcccttttgttgacatttttttttttggctgatttggcagcctttttaagcttcccgtccaccttggcaggggaaagcttggtctacagccacagagcagagcttgggcttggctcttcatcctcgctaaccttcctcttgagcatcgtggcggcgctgcgtggaagatgcgtgcaacggacagagctacactgcctagccaccaccacaggaactcctgtgacccccgaaatacattttttattggtcaatagaaaatctgatacgtcctttggtcagtgtaagcaatgatgccctctagtgacagaagatttattttgtagagactctctgtgtcttaaaggtaccatctaggcaattttccttatttaactctgaaaacaaaatagcaaacattaagcaattacttttggtaaaaagggacttcttacactaaccataagttttaatagcacacgaagaaacttagagttgtaagaatctagcttttacaaaaactgagaatttactggttaggcagtgtggggaggccaagtttcaatcctaaagataagtcattcaggggtcaggtggagccccaggccccacctctccatgtgacatcctctcagtgtgagtgagcttcaatctgtcaaaccacggggctttctccacaaccaactgtaccaacagtgcatctcatgagtatgtttatccaatgtcaaatccagagagaaagagtttgtgtctcagttgcttccagcaaatgatgccaaggttaattccaatggaatgtgatatgttgtttttcttggccaagcagagtccctggttctacatttggtgtcaactttgctgttatggttaatattatctgtcacattgtctagactgtggtgcccgaatatttagtcaatcacggttcatgtttctgtgatactctattttgtatgaaattcaaactaaatccacaggctttttgtaaaattatggcccttaacaatgtgactaggtgtcctccaagaaactcatgaaaaagcctgactatgattgagaaagggaggagtcctaccagcctttggatttgaactacaaccctttcatgagtctctatctggtcaatatgcactataggttctaggcacatcacactaggcaatcatgtgaaccaattccagaagatgtatcatctctgtatcacttctccagccatccatttatcctctattctagtgatcctgtttctcgtcccctggaaagcactgacttaaaagagccactcatgggggctagagagatggagcagcagttaagagcattgactgctcttccagaggtcctgagttcaattcccagcaaccacatggtggctcacaaccatctgtaatgggatccgacaccgtcttctggtgtgtctgaagacagctttagtgtattcacatacataaaataaataaataaataaataaataaataaataaataaataaatctttaaaaaaaaacaacactcttatcagatagtcaaggacagaggggttgagcagtttttctagacccatcctggaagtctcattactaggaaggaggagaaaagatgtagggttaaataaaagtcatggatgtcctctacagttggagactattaaatcaacttattgctatttagttaaagcagtttggctggcagcaatattttaaaatattagctccattaaggaaagaatagaaatattgtctgtagtgaaaagttaaaatgtttctacctattaagtttttacagtcacttatgtatgtgaatagtatgcaatctatccagaaagccgtgctatctgtgtacagtagaaggatactttaactcgcatggtttggtttgagtaagccaggatgactatccagagcactcctcacctccagtggcatgcctggagctatataaaagaacacatttctaagagctgaggagcaagctcagtgggaaagattgctcggtgtgcaagcatgactgctcgagttcagatccccagcaaccactgaaaaagccaggcatggcctcctcttgtaactccagatctgtctggggacagagataagaggatttctcagactttctgggccaccaaggcaggttaggtgacagaacatcaagctccaggttcaatgacagaacctgtctcaaaggaataaggcagacagtaatagaatgacactacatgacattcatggatgcacatttgcacacacatacaccatttgggtttggtttcgtttattgcacttgaaaggatgataacttttcaaaatgtattgttaggataaaaataacctatagaaatacttactgccttaatttgccttctgtcattgtgataaaacatttatccaaagcgatttagggaggaaagagtttatttcatcttatctataacaactcccaggtcaccatccatcactgagaaaagtcagggcaagaacccggagcagaagccaggaaaaaccactgctcacctccttgctctccttggcttgcttagcttactgtgttatacaactcacagccacttgcctaggggtggcaccgctcaccctcccatgccaatcagcaatccataaaatgcccacaggctatctgatggaagcaactcctcggccgagagtccctcttgccaggttactgtgtttgtgtcaagctgacaaaaactaaccagtgaaaatacccaaagtggcctcctcagagtgtcaacaaggtttactcactcaatagatattcctccaaaggttccatcagaaagaacttcagggtacggcatgtgtactcacctccgcttagatgatacagtatatgttagcatattacagactatgagaaatcacagattaggatactctaagcatttttttttgttttatgattattgtgtgtgtatgtatagtgtgtggcatagttaaaagctgtggaggtcagaagacaccctttaagagttggctttcactttctggtgtaggtctggatgatgaattcaggctgtctgcatttcctgttaagtgcctttaaataatccctcaccctgccaagttaaaaggtacaaagaatgaattttatgattcagtgaagttgctgactcaagtttatactcaagagctgttgattttacctagagcttatgctccacacacccccaactcccccctctttctcctccttccccctttctcttctcttctcttctcttctcttctcttctcttctcttcttttttcttcctttccttttgcatggaacttttcatttcaaattgttcttcctttcctttcaattttagaatagttgtattaggggcacagcctgaggcttcttcatggcagcaacaacctacaggaagatgaagcaaaggggggtgggggaggggtagggtgggggtggggtgggtataagtttagtgacagctgccaaacagaatgaacagaacgcctacaggaaggagaggaaggagggtgacaatctagattcagagcacttttaaaaacacctgcagaagacaatgctgcaggatgtccccccactctctctctctctctctctctctctctctctctctctctctctctctctccattctgtgtgtgtgtgtgtatttgtatattcttaattagatagatcctccagggaggaaaagaagtagaaacagaagctgagcgagcgatcagtggattttgcagaccttctgacccatagaggtggagtccagaaactgcttcatgaacaggaaactcttggtgctgaccttgaacaaacttacttaccttctcggtgaacaagcggtttttaacctacagggctggaccaccgtagagctcacatatcagataccctgcatagcagatattcacattacgattcacaacggcagcaaagttacagttgggatgtagcaacgagatagcatcatagttgagcgttgccatagcatgaactgtattagagggtccagcattagcgagggtgagtaccactgctctagaatgttcgcacgacactaaagtgctacctacttttccaaaacaaaagtgactttgagatgcattcattaactagcagtaaagaagtataagaattttttttaacgaaaattggtcaggaaataatccgtaacaaaaggaggaagtaataatgtctaacacagcaggtgagggttttcccttttactgaaaatagacttctctttttgatagatttatatcctgactatggtcccctaactcttttcaccccagctcttttctaccttccatcctatccagatattccctttctgtcttgctcaaaaacaaactggcttctaaggaataatacaaaaagaaacagaactaacacaccgcaattggatgaaacaaacagaagaaaaagaagcccaagagctggcacacaaaacagagacaagctcatgtgcacactcagggatcccttaaaaacactaaatttgaagacataaatgcatatgcaaaggacctgttgcagacccatgcaggcctgcacatgctgccccagtctctgtgaggtcatgtgagctttgatcttgttgacttggaaggccttgttttcttggtcttgtccatcccctctgggtctcagactcttcctgcctcctcctcttggggttccctgagcactgaggggagggatttgatggagacatctcatttagggctgagtgttccagtatctttctctctctgaataatatttggctgtggatctccgtattaggagttattttattataatgtatgtgttgtttgtttgtttttataacatacatatttgtttttttccctaggtccctgggctatctagtctcaggttcttgggtagcgtcaggtttatgttctatcttgtggagtggggctaaagtcaaatccagtattgatgggttgctcccacaaactttgtgccactatatgcactagctcatctctctagcaggacaccatcatagatcaaaggctttggggtagaggtgaggtttacctttctcctttagtagcatgcagaatatcttccagtaccaaagatgttggcatgtagggatgaaggctctatgtaggcactttcttcttgctctcaacttctctatattcaatgagttgtgtgggtctcagtttgtggggagcaatctatagtcttggcaacaggctgcattgtttggggactcccatgcaactctttttggccaacgattcaattagatgcaaccccatccaggaaaggaaaacttcatttgatgacaagagatgttcacttgtggctctgtctccccccattatttggctatagatcaccttcatgtatgcttatactttaggaagactctgctaggtttccatacctctcaaatgccctttaattttagctgtctctccctgtattcccattcatcgtcttcctttcccctcccccacttgatcttcccatcataactacctattttattcctcttccttaataagatctttctgtcccctcccctagtcccttactctatatctaacccccgtggttctaaagattctggcttggtccctgagttaactgctgtgttatttgtcatagtcatttaccttcattctccatttgggaaacgaagccagggacattcccctcatcaggatcccaaagcctattatctctacctctgctgtggtgattgtcacttcatgtatcatatatgagctctgtggagggacctccctcatcagaatcctagggtgtgtacctcctctgtggtaattaccattcagaggccccagaagccccagcagacctgtcactgacaaaatattgaaagtgaaggcaaaatggtctttgtctccagcaatcagccaaagtccaattcaatacagagttcagaattccttccagggtgagcagcaggcagaaaaaaaaatctcacttgacctgagggtgtgactgtggaagcgcccaggatggggaatgcccatttatgcaatcaagccctgcttggggccccttctcctcccccgccccccacccccaccccgctcaggccgcctgtgcagtggtgagtcagtgggtttccccgggagaccagcagaactttctcgcaacccttggggctttacgaagattgtgtttggtccctcaaaagaaaaaaagtgacatacacgtgttcaaagcgatttctgggaagacctgaataggagcgaagcggtttgtgcgtgccagggggcgggcctaggcaaagtacatacccacaggcagtctagagctggtgggtggggccgcaggctgcccacacaggccgcccgctgttttcccttgctgcagacatgctgtggatctgggctgtcctgcctctggtaagctttgggacgcctgggatgtgggacgctgcatactggggaccaccacatgagattccagatgtggctggcattgggtgccaccggtccagatgtttagaaacgcaggggagctgctttcgctcttggctaagtgctcagggctgaagcccaagtccagcgtttttctggaaaaagtttgggtcggggcggggggcgggggcgacggtcagagcttggtgctggccagctcttggatcgatcgctttagtatggctggagagggactctggcttatagacttgcccagacacttttctagtgccactttagggcactagaaaagttcgctccgaggctccctggcatttgacacttctgacagttcgctcaaccgggaagtgagttactctgggctgtatttacaagccaagcattagatcataaaatttctcaaagtaactttgtctgcgaagatttgtttactctcctgtaacaacacgggaaacaaaaaaaaccttcccttccgggaattgagctgtcaaattgtggatggctgaactggtggatatttttatattgtttgtactgtttcttctgttaccctctttctgctggcactctcacagcagatttgtcccagtaaccctagggctctgagtcccagctcctccttgtctgctgcaggcacagaagtaagaactctccagcattcggtctcttcagaaatgcctgttaataaatgccagtccgagggattcgaccctccgaggttcaatccagttctgaatttagaaagattgctttatcaggtccctaaaaatttgccgggcacaaggatctcaaatcggttttcacagcagtggtagaagggaggaagacaacctctccttacttttacaaggttaaaagaggttccgagagcttaagcatttaacagaggtcacacagctagcaaatgacagtgccgggcttcagttgagatctaactccaaggggcatgtacatacacacacacacacacacacacacacacacacacacactactgccccatggtatggttaagagaaaggtttttattgtggatataaaagagaaaatggccagaggcatctggaagagcccagaacatagagagaaagaagtaaactgaacatggccagcagactcgaccagggctatctgagagagagagagagagagagagagagagagagagagagagagagagagagagagagagagatggagcacaggctatagaatagagaaaaccgagcgagagaagcaggcgccgaggtgagagaacagagtgannnnnnnnnnnnnnnnnnnnnnnnnnnnnnnnnnnnnnnnnnnnnnnnnnnnnnnnnnnnnnnnnnnnnnnnnnnntgcaacaggcacttgtggtccaagtatgtgctttgatgtgctggttaataggcactacaggtagtctcctatgtcccatctgccagaggtaagggaaatgactttccaatggatcagaggaggcacatttagtcaaatccttaatacaagcaaaccagataatctgacaacatggtgcagagactgtttgcttggcagggcatgtacaaacatgtcatcttgaagggtttttttttcctagcgattcttttccacaacctgatttactgacctccatccctaccctagatccatattgttcttcccctagaagggacagcctgcaggtgaggaatattctgaatgggaagagcccatggttagagataggagcaagctctaagagcaaactgagagagagagagagagagagagagagagagagagagagagagagagcaggcagggagacatcctttagaagcacagtcatggggagtggaagaggcttagggaaacaccatcagagagaggaatctaatctcttagaggcccaggggtgcatacagaaatgcctgatgtacctgcaggtctcaaagagcaggttccagtgagacaccaagagggatagatacaagcaagcatctcctaggggaaggagaagagagacaagcagttagacagccttagagacacagtaagcttcaggagggagctacctgagagacagacctaaggaggcagctggaagcagagagaggaaatggacaagcgagacagagcaagctccagggtggagctcagaacatgggagggagaacagggtgagagaggaaatcagcaagtctcttggtgacaagaatttcaattctggacatccgcaagtggtcagggtgtccccaagtgggccaagacacttgtcagagagaaatgtccaaaatcacaaaggataggcatctctttcatgtaatggggtcccagtagggagagagaagctgtctgataaaccagcatgacttctgtagcaacagacagagaaggaggcttcaaggaggaaataggtagaagtaaaaagccgctgaagaagcggggctctaaaatttggagttggacctggtaagtgtcagaaaccagaagaaacaagtattctataccttagaagagtcaagtcagaagcttggtttgcttaggagaagctgagccccttgttgggcaccagctatataaactgtgacatgacttaaccactctacgtgtggtgaagggggaggtctttattgtggatatgagagaaagaagagccagaggcatccgaaagagtgaaaaccagagagaaagaaatagacttaacatggccaggagtctgggcctggtcataaatatttgctaaaaaggacaatagtgggggatggggacagagaaatcagtgagagaagcaggggtggggtggggctcagtgagaagagctgggttaggagccctatgagtgactgatggggagggaagcccatgagctgagggcagtttaggagaggggaggtggtgagaagggctaggatgctggctagcatgaactttgaaatgtgtaacaagtacttgtgataccagcatacactttgacatactgacccttctgccagagataagggcaatggactcctttggctggcttttatctaatttccagaaatcctataggccaggtagagctcatttctagacagttggacagctgaacggtcttttggagtttgggggggaattggagtttcttttgggcacagcagtttgctgatttgcatctgatatctagaatataccaagagtttggaatggtaaaggctcttatacttggtaccttatgaaggggtggaaaaaaattccttttggttctttaagaagcgattcataatatttgtccttcagaaatgtctttaggaaattttgagactctcctcagtgcaaagttcctagtccccactccttcactgtagtatgggtggcctggaaaagctctcagctcttagagtaacattaatgaagtaacaggaggcaaaaggcctggagctatgctcagcttaggggtagctgtgtctttaccacaggatgtgtgcctcaagcacccaggaaacagcctttctaaaagaagacacactcatacatgcatgcacatgtaaagtttacacacatactagtacataaatgttaaaattaagtataatttgttatatttatgatttatggcctaggaaattaaagtttactagacagtattataaagtcagacaagtaaaattgtaataatgatcctgtcacctccataatccttgcggcatgctatagtaccttgcatccctcccatgagacgcagacgtgttcttactcagaacgtggacttgcccaacaccatgcctccatttttctagcattgtgttacctcgagtctctcctaaaatatgactccacatgtagtatggcttcctcagttgtagcatgtgtgtgtatgtagtgtgtctctgtgtgtatgtgtgtagtgtgtgtgtgtgggtatctgagtgtgcagtgtatgtgtatatgtttctgtgtgtgtatgcctctgtgtgtgtattaccaagtggtcactagaaggtttaccctgcagtttttagggatggcacccgatcacacactagacagctgctttcctcatatttcttagagcagatgttaaaaatggctgaagaagatgagaggtgatttagaaagcaaggagtaaccctacagaagcatctcacaactgtgggtattttggttcattttgaaaggtgggcaaagacagctgttgattttacacttcaatcattttctttaaaacaactctggaaacatgaaatgtttttttgatttttgaaagggctttatttatcccagaagggacatgaaagttttatgaatacaataaggagattaaatataaattaaagcactaacaagtgtggaaaatccaagttttgtgggttctgacgcattggatttgttttctaactaagccatcttctcagcccaaaacccaagttttaaaatcatagcaagactgagaagcaagaaataagttgatgtctggaggccgtcagcatccctctccaaatactactgctgtttacaatagacagaattattgcctttagagccaatggagactttaatgtacgatttttctttttattctgacactgagattacaggaaggtcaaaggtgataaagaactgacaaccagagcctgatactacttcttagtaagctcttggagagcaaatagtctcggggtgagagctgccagtgtatcagaggccgggggctccaggatgctcaatggagaagccaatcgccacaatccggttgctggctggaaagaatcactgtttttcagagataattagaaacttgaagaaggaaatccccctgcaaaagccccttctaacttatgtgctgtgggtgaattctcttggttccaaaagtcccgtactaagcacatgttttatacgaggtgccagagaccacttactaaagagaaacaaacagcatgggatttaaagatgcaatgaaataatgcaataaaaattatcttggagccaggtttaagatagtgaatccatctcttcttctttttgagtaagtaaatatttaaaaattgcccaaacagtgtgaaattaaacataaattctggaaaataaagtcattttttaaaaaatcagccttatgggaacatctaaaaattttacttacagcttctgagccttatccacacaggtacataattgtatgtttaatcagtgtgatgtatgctctgttctctgacactcaatatatatggtaaccggcttatgtttcttaaggtaatgatcacctcatgacattttacttgatattttatagagaaggtatttattaaatgaccttgaattagcataatttcatttattaattttatattttataaggaaatgttttgggtgtaagaagtactttgatgatagtgtttacctagcatgtaccaggcctgaatttgatcccagcacaaacaagcaaataaacaaatcagtcaattccacaaagaagaaagcagtgaatagaagtgcttgctggcaagtcttccaaccagagctaggtccctgggccccacatggtgtaaaagagagctgtcttgcagcttggacctccactaatgcagatacactcacagacacacatgcatgcatgcatgcatacaggcacacatgacacatgcacattcatgtaagtaccactgcctgtagtcttgttttatttttgctgtgggagcacataagtgtgtttgtataactcataaaagcagaaagaaaacccacttagttacctaccagtaccccactccccaaaatccttgctgtcaaataggagagggggcttgggagctggctccatctcaaaaactgccgctatgcaagtacggagttgatagttgtagtagcaagcaatctttcctttttaggaaggaaatgactggccatcttctctaaccactgctcctccatgtacacagctccatcaccccacagtcatgagaatttagaagcagcagccacaatttgttcaagcaattgtccaagccccactcagtgcagatgcttggaaggggcagtctctgtgaccatcagggctagcagagtatggtcaccaggaggtaagaaggcaattcagttcaacacagctaagtagccagtgtcgattcctactttgggagtctgaccctgagacgtttattttaggcacatggcaaaattgggtgaaaactttcctggtggtaatttactcaggactgtgtacacaacaaagcttaagacatgactacacagaaagttccttatacaaaatatgtgacatcttccataacgatgggttctatactacatgtgacacctttcataaagattgggtttatagattgattagcttaccataagggtctgggggagaatccactgtggttccagccatgaggcataaagtacataaggcaatgcagatgtgtgtgtgtgtgtctgtgtgcaaaatttttgtcaaagaaataggctatacattgtttgaaactattttaacacacgtagtatgctatgtaaaatacatagatacgaatttatttatacactgatctttattgttagttggaaccatttaaatggtagatgtttttttatctatgttggaaaacagaatagggctagtgtagcacacagggctgttcccctatggcttagtccgatctggcccctggttccaggtgtggcagcccagctcaacaaagtccactcccacttagctatcctgactctctggatcactgctagagctcaagcatttttaccaaactgtaccatgtatgattctggtatttgttagagcttttgtgtattacccaataattctgacatctatcggggtttctgagagcagttttaggaagtttgcttttaaagtgtccataatgctgttttccatttgcagcatactttgaaaagttcaccttattatgtaagtgttcttgcagccataatttgcgagtgtagtaagataaaaaagaatgcttctagcttatttaaaatgcatgctgatggcatgatctggaagacagacaacccaatttgaaagggacacaatttaccctagaacctatgttttcacccctctatttgaacttttggagttaaaaatgtttactttcaagttgtagatttgaaagcaaactttctaaagtgtgagtgggggcaaaaaaagaatcttctccaatactttcccaggaggtaactaagaacattgcatcattagatttgtctttttcctcctatttattaaaacacacacacacacactcaaacaaaacaaagaaacaaacaaaaacctgattcacagaagacagtcaatccacacttctctccaggtgtaaaagcaaacatatttctttattcccagttctagagaagtactgagtgtcaactaagtcactttattttgctgtctcattgataaccggaaggacttgtcaggacatgggtaagaaggcacagcatatttttatagcaagtattgtgtagaaatgatgtccagagacacatcagaaagaccgctcaccatgaactgcagtcgcaagtttgtaaagtttgtagtgaataatgtgacagagctttctattcagtcaacagttctttcccgtataactttaaacggaccctgtactttttgtccagtttgcttaaagaagacagactttccatcacgatgaagcaaatctggtaggtccagagatggtagagctggactcagagcaccaggggaaatagatagctctgaccacacaaagtcaagcagagaagaacaactaaaaaggggttgtatttatgatccttaattcagcaagctgataggactgccatcaaaaccaaatgacaaaacaaaacaaaacaaaacaaaacaacaaaacaaaaacaaaaaacccaaaaatgttcatgaaagaccaagtggtacttactcaaacacaaactcttttcatctctgagacattaggtggttcctgtttcagatttactactgttatctcaaagctcctaatcttatccctgaacacaaaccagaaacctttgcagaacttcagacttcatacagtcttgcagcccccgaagttgcctcttttcatttgttgtacagtgaattcatactctgagcaaccagcatcattcacattttgatgaatttttttaaaaagaatttcttgtctttattttgttttgtctttgttttgttttctgttgtttctccctctcctctcttgagacagtatctctgcatgtaggaaccagtctagcatcaaactggcaatcctcctgcttcaaactccccaggatctgagatcataaacgtacactgctatggctgggtcagacatattctcctctcctcctcctcctcctcctcctcctcctcttcttcctcctctttttctcctcctcctactcttcctcctcctcctccccttccttctcctcnnnnnnnnnnnnnnnnnnnnnnnnnnnnnnnnnnnnnnnnnnnnnnnnnnnnnnnnnnnnnnnnnnnnnnnnnnnnnnnnnnnnnnnnnnnnnnnnnnnnnnnnnnnnnnnnnnnnnnnnnnnnnnnnnnnnnnnnnnnnnnnnnnnnnnnnnnnnnnnnnnnnnnnnnnnnnnnnnnnnnnnnnnnnnnnnnnnnnnnnnnnnnnnnnnnnnnnnnnnnnnnnnnnnnnnnnnnnnnnnnnnnnnnnnnnnnnnnnnnnnnnnnnnnnnnnnnnnnnnnnnnnnnnnnnnnnnnnnnnnnnnnnnnnnnnnnnnnnnnnnnnnnnnnnnnnnnnnnnnnnnnnnnnnnnnnnnnnnnnnnnnnnnnnnnnnnnnnnnnnnnnnnnnnnnttttccctttccacttaaaaaaataaagtcttatcttgtttgttttgaacctgaaggggggggagtaggttctctctctctctctctctctctctctctctctctctctctctctctctctctctctctctctcaaatctagttcagcccttaagatcctttgccctacttagccccaggcaccagccatatttacaggaggttcaggtcttcaagtaggtagcttatttcagtcacctgtgtgtcactgggctcgtcactggcttcttacttcttgagtgctgacatgtcctgggaagatgtggtgagcttgtcctagagggtgccatggcacaggggccagtcctcctgggtgtgctcattcctctaccatgtcttctgtttgataacttgagtggctctgaaaagcacttctccactaggcttcaggccaagaaaatgcccactggtatctgtttctcataatctgttaacaggtacccacgattgtgggattccttgtgagaattccaggggagaaaatgtgaagactcaggcatctatgttccagatccacaactctaccagacacactgcaatgtagccatggctgttcataaaatgctgctccacctggagagaggatcctcaaactgaggttggcaggcaagcctcctatccctccacatcccagtcacatctctgactttcgtggctctcctacatttttccaccctagactaggttcttgagcccaacttctggacctgagagaaatcttctcaaaaatctccccttccgccaagcatgtttttgttttgaaggttcctcataaaactaacatgctgacatttgtccagaattgtggaaaaacagttactagtgtgcctaaatgaagcaaaagcaatgaaggaaatccttacaagcatgcatcagagcctagtgcaggcttggaacagaagtgctgaactagagtcctttgtgaagcactctcaaatctgggcttttgggaaagtcatttctcaaatgttgtgttcactttcaactatagctaagtcagcaatgattcctcgtgagtactttgctgtaactgaagaggtggtgcatgtgaatgaactgaaagggccaggcaagtgtcacaggcaagatgcaaataaggatggatactctcacatcacatgggcgcaagagattcagaaaaggagagagaaaaaacaaatcttctgatttgcaggagtgaagattagactacagattaaaatctgtaggtaatgaaagattcaaagagatactctttataatgatttatttatagttgtgtgtatgtgtgtgtacatgtatttgtgagtgtgggtgtccatggaggccagagagggttacagatctcctggtactgaagttacaaggggttgtgagctgcctggcttagctcctagaaaccacactctggtcctctgtgaaaatggtgcatgtactttaaatgtggacccctctccagcctgaaggagacccatttttaaaatctggcttgaagctgagcagatgtcacgattcctttctaaccctgatgttccaaggctattgtgagtgcagcacaggagatatagacgtcctctgtgactgtgagggccaaagcgctcattccctttgtgggttgggagccctagaaagctagtccccagcatgactctcatgcttctcccttatatagcataggctctgtaacttttttttatgctttgaagttgttttgttatttgtcttattttattaggtatttatttcatttacatttccaatgttatcccaaaagtcccccacatgctccccccacccactcccccacccacccactcccacttcttggccctggcgttcccctgtactgaggcatataaagtttgcaagtccaatgggcctctctttcctagtaggccatcttctgctacatatgcagctagagacacgagctctggggtgggtactgggtagttcatattgttgttccacctatagggttgcagatccccccagctccttgggcactttctctagctcctccatttggggccctgtgatccatccaatagctgactatgagcatccacttctgtgtttgctaggccccggcatagcctagcacataggatgtgatgaagacatcccactaagagtcgagtgctccaaagtctctcacttcagacactgtccagttatgggactctgggttactgtacatctactgtaagatggggcttctagggtgaggttgagagatactccaagccatgggtatagcaacatgtcattgggtcatttgattgctatttttctatagcacaatattaataggttttcccctagctgagaccactttttcttagtgaaaaaccccctcactcaaattccctatgcatcctagcttcctttacttatttgtaaagtatgatttcaccctgacaaacccattacctttcttcttttatttttatttaattaatttatttatttatatttctagagacaggcttcatttgtgtagctcagctgtcctggaactagctctatagaccaggttggcctccaactcagagatccgtctgcctctgcctccccagtgctgggattaaaggcctatgccaccattgcttggctacatttctttctttattaagcatttcctccctagagagggttcatattttatgtcaccctgcacacagagttttggtcagacactctgcaagtatcctgagatgaacaattaaattgatatgctgtgagtaaaaatgataatcctctatattatgtatagatgcaccccattcagtctgctgaatgtgttaataaacaaacactagcctgctcatttcttcagtaagaaagatttccatcctcagactgtcataggacttgagattttgatgcagattttctggttgatggtccataccatctgatctgagggctgacacagctaattcttaaaacaccctccacacacaaacacccgtctgcatgccatgcgtgaatgtgttaacacacacacacacacacacacacacacacacacacacacacacacacacacacacacacctgtgataaatttccatttccctggtgacaaatacactcacttatatatagacaatgctacaagagaaaatgtatctttccactgtttttccgaggcacttaccagaccacacctgacacacagtaggtactcaacagtacatttgcttgtttgatacttcgtttagtagactgtgcactcaagactttaaaatggtttacttgtcagacatttaactaactcttgtattcccctcttttccctcctatccttggtcatagtttatctactttcttgctatgaattcattttctgcttattctgcttctcaaacaaaacaaatcaacaaccacccactcagaacatttagctttgtgtgggtttcctgccctatcatagttgaaatgctcctgtttctgcctgaatggtttcagggaaatcactaaattctgcaaagatgactgaatgcaaaaaaaaatgtagtgaaataataataaaaattctttaaatacaaactgtgtggagcatggcttactttgcctctctttttggcacctgacacaattcattgatgtcgtgttaagtaaggaacattttcagaaggactctgaagtgtgtgtgagaccacatctgaaaggcagttgctgctggataaagccagctggctgtgtctcttcactcctcttgacctcagaattcatatttctcgactctggatgcattttagacaatgtttccctgtcctcagtgctggggaactaggaccccatgcacttttggcagtatgacacccttgagctcctttataaacaacaacaaaagcaatatttttattttgagatgtcccccctatgtcactaggctggcatggaacttgcgtagaagaccagcagacttgaacttgtggcctcagcctgagtaactagggctgtaacactgcacaaccaggcttccatgggtgaggtttgacttccagttcaggactttaaaattaaagcagaatgaagttgaggagagaggtatatttcttttagaaagcttcaaaagatagaatgtgtgcatactttttttttcatttttattagatattttctttatttacatttcaaattttatcctctttcctcatttcctctccaaccccctccatcctaccgccccaccccctgccccacctccattcactaacctacccactccagcttccttgtcctggcattcccctacactggggcatcgagccttcacaaggccaagggcctcttctctcatgttccacaaggccatcctctgctacatatgcggctgaaaagcttgaattcctcctgtgtactctttgcttggtggcttagtccctggggatactggttggttcatattattgttcctcctatggggctgcaaaccccttcagctccttgggtcatttctctacctccttcattggggaccctgtgctcagtccaatggatggctgtgagcctccacttctgtatttgtcaggcactggcagagcctctcaggagacagctacattaggctcctgtaagaaagcacttgttggcatccacaataatgtctgggtttgggaactgcttatgggatagatccccaggtgggacagtcactggatggccgttccttcagtttctactccaaactttgtctctttatgtcctcccatagttatatagatccctcttctaagaaggaccggaagtatccatactgagaaagctactagtagcaacaacccatagatgtaaggtgtctttctgctctgttaacttgaatatttatgcacttgtgaatccctcagctgttgcttaagattttcataccaaagacaggctacaaatccacagggcacatacaattgggcaaaagcttcttagctttgtcattttttgccctagcctcaaccctataaatgccctctctttgaatttcaatgtgtcattttcttgtttctatggaaaaccagaattgacaggaaagagaagcaatttttgctgacaccagccttactccttacctcaaccaacgtggctgttgctaggaatcgttactcctcctccactcaatgggttagactcagttttgatcattgtcaccaaagaatattgatcgaatgctcctagcctttgaggtatttctctgacttgagatttctttttctctcttgctcaagtctccctaacctgcccacgtgtgtatttgtgtgtgcatgcctgtgtgtgtatatgtataagtgtgtgtgtgtatgtgtgtgtgtgtgtgtgtgtgtgtgtgtgtgtgtgtgtgtgtatgtgtggtgtgagtgtgtatctgtctgtctgtctgtgtatggagtttggaggtcaacattaggcatttacctcaatcattcttcaccttattttcttgaaagaagtttttcactgtgtctagaacttgctgagtcactaggttggcctgactgcactcccaggaatttccctgtctccctctttttccccagtgctggcacatggcttcttatgagggttctggaggatccaactcaggtcttaatgcttgcctcccaaacacttcaccaactgggccacctcccagatctagtttatttccatgtgttgccaatttctggaatgtcaaatggcttagttcatctctcattggccagcaggactttgacacagccatagagtacagagccataagaatttaaatagcttttgtgcaaaacctctcttatttgaacaattcatgttgggcatatttcccaataaattactattccctagtgccccccagttctgtcaccatagctgatggctatccaatctgaaagaagacccaacatccactggaccagtaccctatctattgctgctgagaaagcaagagacagaaactgccattctgaaaagagaagttgatgataataaatatagtttatttaagctgccctgttagagatgtcttaaaggaaggagtacagatttgagtgtgttttaaaagcaataggttgtgggtgtagcgtggtggctgataacttgctagattccatgaggtcctgagttcaattcccagcaccacaaaaggaaaactaaaaggacatgcaaatataaagtgtgaaacatccctgcacattatcttgttataaagcacacatttatgtgcaagtctgcctttgggaacttacctttttcccatcagtaattgattatatttatagttaccagaacgtggcttaacaaatgtctattgggttgagctgacaatactttaggcacggtgctggcattcttaggctcagttcttctcatctttgtagcacttcttcttgtcatttacacataattgctcaagtgcagaaagtcagtcttattttacattatgctcattcatctctgagtacagggaaaaaacactatactgagagctggaaaactttagagacattctagctgtccctttttctagtgagaaagtccagacaagtccaatgtttcctgaaattttagtctcacttttccctatttgaaacctggatgtcagagatgcatcctaaaatacatctatctcagaagaaaatgtggctaccacagaggatctaaaatgtacttagagaaatcctaacaaagggaccatgcagctgttacctctacatgctttagtattttttattttttttgcttattttcctaagcaaagataaattggaaataattttgtttgggattatgggtttatgtcttcaggagaaaagaattagacatagatttaaagatttgttctccataaagaaaagaaatattacacacacacaagggtaaagagatttctaaggatttagtgggaagtttattgtatctttgaaacagtgagacattgattctgtgactgggtagcaagaaggaagcacagacatactctgcctaagaatcaagtctgatctgagtgactccttatagcttcatgattaacctgtaaagacagaaaatactcatctcattaacaagtgaagaaatcaaggcacagaaaagtcagtcactcttggtagaaacaaggtttcaaactctgtttactttgatttgttttcccctctcttttgttgtggggacttaatgtcagtagtaacagtagaaataccactgctcacaggaaacatccttactaattaccatgcattgtgctcagagctttgaatgcatggttctatttaattatcactacagacctgtgagacagtgggtatttctactgttcagatgatgagtcggagcctgggaggcagtatggattctcagacctcccctccaccacccatgtatggaacaattatgtagagtcaacgctgtgtttctagtgtgggctagaaaaacctgcggttgaacctgccaagccacagggtactcatctcctggcaaccaccaacatgccttggtttagcctgtacacagatctagtcacttccaggtgtgtgacacgtatttcccacgttgcttggttcagaaatcactaacatccttattctgcttctcctttacaggtgcttgctggctcacagttaagagttcatactcaaggtactaatagcatctccgagagtttaaagctgaggaggcgggttcgtgaaactgataaaaactgctcagaaggattatatcaaggaggcccattttgctgtcaaccatgccaacctggtaggtcacatgaagcattcagagatgagcgtgagaagcagggtgagagattgaggtgcccgatatggaagaatgtgttggaccattatgcagctattggctgtgctatagggtagagcattacaaagaagggggagcaggactataaaattgttttccaagcacaattctttcatctttatcatatttgtctgggctgcttctaaaagaacatcatttacagatgatgtgcatagctgaagtgagaagacgcatttttagttctatttctcacaacctaaggaaaattcatttgtgaggattaaaaagcctaaggcatctcaaagctcaccatgctgtgcctgactaatttgggggctcccttaacaagagatttgtaacctcaggggtatgtgttagagctcctctcttcagtctgactctaacgttctctggcctggcactgaagcctgcaaaaactacatttccattttttcagctgaataaccagaagaaccagaagagcagtgaacagcagccaacagtttctcaaacatcagtgttttgaaatgcaaatcaatttcagtttggaactctctcacgcatcagaaaatgagaggctaaggggagcataattctgtaaacttagtttccaccttttgggttgaccacagtcatatagaattatctatcttggatgcactaggcggataagaagttggctcagtggcatataggtttgtttgataggtctcaggcaatagactttcaaaaagcttccgtaagtttcatcgttagcatctcaggcctgtggtactcaaagtgcaaagcaggttaaggtcacgcctatacaaagacaattttactaagcctagcaggaaagtttttcttataatacaacccacgtatacctaagctcctaaacacttactcttttccaaacaggaattggaaatcatcaactggcttttttttttcttttaagttgtcatagacaagcaatttatgagttaaaatctgtgtttatactttgaaagtttgatacaaactatactttacatgcttaaaatttaaaagaacaaactaaaacaaaggcaatgcgttttgcatattaaggtttctaaaacttttgtctgtgtgctttgttttactctaattttgtcttgtttgcatttaaaaggggaatcttatgcctggtgtttggatctgaggatgctctcgttccactgtggggtgtaaatggtgcaaacatttaagaaggaaaagggaacatgggtggagaacccagcaatgttttttttgctaatacagtaatggattaattgatctggaaatgccttaaagattacaagtattgtgtatatggcatttcagtttgatacccaacagtgtagggtttggcttgtaaattctggagtaatagaagcctgggatagtttgtattaagcagattctaagtgcctcagcctttgttttatttttctaacttagtccttagttgtacgatttcttttagcaattgcaacctggcattctggctgtgttaacagcttttctctgtctcttcactaatacatcccaactgccattccacacgcactcacagctctctccacctgccttctccctggttgaatttcacatttaccaagagttaagttagtttcaagtctgtttacagcattgatgatagtaacatagaatacttattactgatgataaaaacccagtgaatatcaaatattgggaaatgacaagttttatttttttttttaaagaaaactaggctgagcattttggagaccatcagaaattcagcccgttggagtgattcaactttcttttcatcaaaaagaagagaattgggagaagggggtggggtgggtaaagaagccaaacggaaattgcagggggtgatttgggtggatgcaactttaatgaagagactataactcatctctatgtcaaacgattgacatacttatggagagactctttaaaatgaaaacacaatatagacttttccagtgattccatctgtgaactggtgcttttgattgattaaaatacactgtatgcttacagcaatttttaaaattggaaatcgattcttcttctttacaatcatcccgaccacagtgtcctctccttccatgcttcctgtcttccctccccaccaccagctgcacctattcccttcagaaaagagcaggcctccaagagacaacaaccgattatgacaacccagcaggaggaaagcagagtaggcaagaaagtcagagatacacccgctcccactgttaggaatcccataaaaagtccaagatgacagccattacatatatgcagacctggggcagacccaggagggctctgtgcttgcttcctctgtctctgtgagctcatatgatccctgcttagttgactcagtaggccatgttcccctggtatcctactctgcctctgcctcctacagtcttcctcccttcccccttccatgaggttcccggagctctgaggggagcaacacaatggagacctccaattcagactctttctctgcatagtatatggctgtgagtctccatacccactcccatctgcagctggggagaagcctctctgatgacaactggacaaaggacccatctatgagtatagtagaatatcgttgggaatcattttattgattttttttatttctttttcttttctttttttttcttttgcctgttctgtttggttctaccttaggtctctcagctatccagtctgattcctggccacgtaggcagtgtaaagcatgggctccctctcatggagtgagcttcaagttaaacaagacattggctggccactcccacaagttctgtgccaccattgccccagcacatcttgcaggcaggatacaagtaagttgagagctttgtagtgttggtgtccagtttccctttcagtagtttgcagagtactttcctgcaccacagagactagcctgtaaggatnnnnnnnnnnnnnnnnnnnnnnnnnntgcaggtaccagcttgacgtctctatgttcaaagcagctgggtggatgttgtcctcagcaatggtggcctccccaccaccaccaccccacacacacacccgtcagcttttggagagcaaccctctgttctagcatcagtctgggttgtttaggaattcgcacaggaccccctcaggcaacaattcaaccagatgcaacccagttccaccactggaagccttgcctggctagaaaagatggccagttctgactctgtatcctccattacttggagtcctcactaaaatcaccctcatagattccaggaagagctccatcacactaggtttccacatcgccccaaaatgtccaccaattccagctctctctccccaaactctctccctccatccctccccatctccaacctgatacctcgcactcccatccccacccatcccagtccacctgcaaaatatattttgtttcccctttgcagagagatccatgaatctcccccaagagtcctcctctttaactaatttctctgggtctgtgaattgtagcttgactatcatttaattaatagctaatattcaattataagtgaatacataattgtgttcgcacaaataccatatttgtctttctgggtcagggctacctcactcaggatgatgtttttctagttccatccatttgctcacaaatttcaagccagaaatttttaacatctgagtactactccattgtgtgcactaccacatctttcttttttcatttctctattgatagacatctaggttgtttactggttattacaaataaagctgcagtgaacatagtggagcaagtgtccttgtgatagcatggagctttgttggggtagagcaagagtggtataactggaccttgaggtagattgatttcctattttctgaagacctgccatattgatttctgtatggctgtacaagtttgcactccgccagcaatggaaaagtgttcttgctcctcatctcaccagcatgagctctcacttgtgttgttgatcttagccattctgacggatgtaagatggaatcgcaaagtagttttaatttgtattcccctgatggctaagaatggtaaacatttacttaagtgtttctcaaccatttgagattcctgtgttgataattctctgtttagatctgtgtcccatttgaaattggattacttggagatatatatatatatatggtttcttaacttctttatatgttttggatattagacttctatctgatgtggagttggtaaaaatattttcctattctgtaagttgctgctttgtctaattgacagtgtcctttgccttacagaaacttttcagtttcatgaggtcccatttatgatgtttctgattaagatgcactgtatacaaatacaaaactttaaaaaataaataaaaatttaatacttgaaaagcctttatcacatcttgatatccagtaggatgaatccaacagtgcattttttatattatatacacacatatatacatacttatttgttgcttctatatgtgtatgtattgtgtatgtaagacatacacacttatctgttgcttctatacatgtatgtatatatacacacttatctgttacttctatatatgtatgtatgtatatacacacacacttatctggtgcttctaaacatgtattatgcatgtatatgtgtgtgtgtgtatatatatatatatatatatatatatatgatatattttggtttatttgtatacatagaaatgcaacaaaattagaccataaatatatcaaggcagttgctatgtaggagcttttaacattttcctagcttttccaaattttctgcaataaatatgtgtgtgttactatcagaaaatgatacatttagaaaccttatgttcaaggaaataaccatttatttttttgtatttttgtaaatttagattgtgcactttagaggaaagaatctgaggctaattgtatccatataaagctaagcatgctctactacctagctcatgagatatttcagttcccttaaacagcagtgctgtgccacctgcaggaagcgcagtgcctcctctgttctgctccccctgcaaagcactactgtggggctgtctggctctgaggcgctattttaatttgctccagactctcttgctttactttttaaaagcagacttgcttctgtttactaaaaggttacaaaaggtcacccatattttcactttactcattgacttatcaagtaaataattgtgcttcgtcagcaggaatcctatgaggtaattcaccaagccgtgccctaggaaacacagcatagattccatttgctgctgtgtccatgtggagcagatttgactgcgtttgtcatttgtattcctggctagagttaattgttagttacactgttaatgcctagatttgctagttactgcatcttgctacatttccctgtacatttgctgcactgagcccattactcactgaccctagcttctggctgcaccggctgatgcttagcatctctgcctgagaaggtgaaggccctggaggctaatctcttgtcttacttctagtgggatttccttcagttcctagaacatccttagcacgaaacaggcatttagtaaacgcttgtgaaatatgtgacctttccaggaggcattgctctataatgcttaatcatagaaaaagaatgacttactttaataaatcaaagcaaaagatgaatgtgtatttcaaattgttcgtgataataacaaacaaatagtaaacaaaatttattagaggtttgtttttgtctacaaaagaagtcctgtgttcctggaaaagaaactgaaaggggagagaagaaaaactgtgaatatttattctgtggcctgggcatggctctgaccataaagacagagaagtcctcattatttgtgtgacaaaaacttgggcttacagacatgaagtgctctatcaaagatttcacaactacttcaattttgatcaatatttctagaaacttccagtgctctttttcttaaactgcattgtctatgagcaggttttgtggactttgaaagacaaaatgagaatcagaacacagtgagtttattcagtaatctcagtggccaaggacagccacctccatgatctggcctctccttcctttcacagaagtgcatctggtcacttgaattgaccctttactcatatgttcctgtggctaactatcctactattttttttcttttgagacagggtttatttgggtagcactggctgtcctggaactggatctgtagaccaggctgacttgattaaaggcatgagccaccaccacccagcttaactatcttatttttataagaatattgtttggctttttattgaagacttcctggcttttttttttcttttaactttctattggttctttgtgaatttcctatcatgcatccccactcccctcccccttccttcatatctaccctccatccttccctctcccttcccccttccttcatatctaccctccacccttgtaacctccagggcctgagaggtaatcttcttgtggaagctgtagtgtcaatgtatcccacagtattccctcttgtccacatttctttctttgcaaaagttcgttccaatgacatattggtgtggcacgaggcctttggcttctcttactctgtcagtactgaaatctcactgtgactcctcagatatcctgttgttgccctgtatcatggagatactgtagtttggagtctgtaagattagccccttcatgtattctaacagttcatccgtgggatggatgtggaggtgggccaatgcaaaggccctgatctgggtccgagaggtatctgagctggtcagcctgacagctcccatgttctcacaccctcaggcctggctcagctatactctgctagccaggtgaggtgcgtggcctgctctcccaagagttgctgttagtgagggatatggccagttctgctctcacaatcctgggcgaggtctcatgtctgccttagatggtgatggacaagggaagggaagagggtgtctttccctcatccgtgccaccactcagcagacaggaggtagaactggctctcctccactcatgccctcagggccaggaggctcacctgcatcttccacacccagggccagctctcttgtgttgcccaggcaaggtgcagggctggctctcccaagggcggcagcagataaagggcagggacagatcttctcttgtgatcctgttggggtccagctcttcagcctgccaccagaggccgggcaaaagggaggtgaggggatctctcctttgttgaagccaccacacagcagacaagagacagaactgggtctcccacatgcacactctccctcacccgtaaccccaacatggtgggtcagctctactgtgctgcccaggagagatgcagtgagtgcactgctgagtgccacaggtggtgaggggcaagtgagtatctcttcctgctggctctggatgtgattctttccccaaatagctgtctgtcttttacattgcatttgcatataatcagcctaacacagcatctcctgatgttaagattctttattatcatccttacatactttgcctaatgttaacttggagactgccctgactccagaaattcaatttattccttccttccttcttcccttccttccttccttcttcccttccttccttccttccttccttccttccttccttccttccttccttccttccttccttccttcttccctccatctctccttcctctctttcttcctaatttcctctctttctttctttctttctttctttctctctttctttacttctttatttttttcatgacaggtaaaaaaaaagttgaggactgcaaaatgaatgggggtacaccaacctgcgccccatgcacagaagggaaggagtacatggacaagaaccattatgctgataaatgcagaagatgcacactctgcgatgaagagcatggtatgtatctacaatgcaatttagagaggccaatcctgagcctccatatagaaccatgcagtttgagattggcacttaccctggtccatgccagcatacaggaaggagcggaatgaggctagctgggtaatgtggagctatcttgtaaggtggtaatagattctaaaggccttcacagtgattcttccaaatggaagcaaaggactaaataactcgatgaaaacagatactccagccacaatccaagccacccatagaaatctttcccctctatttctattaaaacttgtctgtagttcttgttcatggcctaacaaagaaacccaaggtgtgggaatgatgtcccttcatctttggggatcccatctatcatcattctatttggggacctgactttttgtagctatttcaatctcttctcaaggccaggatggattttaagaaatgacagaagcagttgtacttaggtttgacatcaagaaaactctgggtatcaaattttaaagctctttttctctcttctctctctttttttttaaaggcatagggcttttacattagtctataaagaagcgatgcagaaccctggctatacattaaacctgcatcaggagctgttgaaatactaatgcttaggtctcagctcacaattaagtcagaatctccaagtgtggcttggacatttgtctgataaagcctagtttaggcttatcatgaagcagcatgatggtgataatgatgatgatgatggcggcaatggtttccaggccatgtatttaagttgcaaggctttctattaaaggcatggcgttgccatctaagcaatggtaggtagtatctggccttctggattatctactcaccaaaggctctttttcatgttggtatttccttttggttagtaaacattgttactaaaggtgtgatagtgtaatagctatatctaaacaaaaaccaaaaaactatgccatccctggccatttttcatcacttattgtttttattattattattatttttagatttatttactattatacataagtacactgcagctgtcttcagatgtgccagaagagggcatcagatctcattatgggcggttgtgagccaccatgtggttgctgggatttgaaatcaggaccttcggaagagcagtcaagtgcttctatccgctgagccatctcaccagccctcatcacttattgttaactagctactacaattaaaactttttaaactggctttccaggtttagaggtggaaacaaactgcaccctgacccagaataccaagtgcaagtgcaaaccagacttctactgcgattctcctggctgtgaacactgtgttcgctgcgcctcgtaagttttagcattcagtgcttaagacactagctatgagatggaacatcctgccttctgagagtagaaccacactgaatgagagttcggggctgagttctgttcttgtctgtcctccttttgctcagttggcaccaaacgccactgagctcttttaccaaagccatccggttcaagggatgttgctagccacttacggttgtgatgggagacacgtgactgtcatcaaggttttggttctagggcaaagacatccaagttgggggggtgtgggtgggtgaagtaatcaatgcttattgcatgtcagctccttatggtgtctggcacacataagacatttttgctcggattggtgcaagttatgcaggaagtccttttgactgtctgaaaggtgagagtatggaagaggcaggaaaatgcaccagcagctacaagtgggtaggaagtgtgttcaggcagagaaccgcagctttaaaaaggcataagaaactcccatatctgctggagggtagaaaagccttggagggagctggataaggactttgccttgatgcacaggggttcgcttttgactccaatctggaaagtctggatgtccagcccacttgctgattaattgagctagtttgagcagatcacttactctgtctggacttcagttttctcactcacgaaatgcaaagaatctttaatgaactccgcgcacctgccacatttctctggagacccacactaggtaatatattttgcaaacacagcttttgctaacgggtaggtacatggtaatggtagatcacttgtccggcatgctccaggagtctcgggttcgattcccagcactggaagaaaagtagcttttgttttgtaagaggctgacattgtacaaaatgtttataacggctatttccttggcattccttaaacctgtaactcaccttcagagccttctggctgttcatctaatactaaatctattaatgctagctgtattagagacatgctgctttatattttactattaggaaaagcatttgtgttgcctccctctcccgccccaagtgtctgagagtgatgagaggcaaggtatacattgtggggaagtagctaactgcgttcagcaataacacaatattagctccatatactttataatcacgatttaattttcttctcactggcactctttggggtagatagcataattatctctgtgctgttggtgagatttcagattcaggctcctgcaggtcaactgctttcccacccttgcctgtttaggtttcaggaaaaggtaggctgtgaacctgcagaggttagctagctgaagaaagtcccccaagtgcctcttcactgtcctgagcactgcctgctggggccctgggcagcatcttaggtggtggctaccagcaggcagttttaagggttttttaaacatttttttggaaattgttcttgataagttatttttttaaaatagcttatttttagctcttatatcttaagaactcaatgtgtcaccaatttagtttttaaatatggggcccagcgatatgcatgtgactgtggtgctgaggagggccagaagatgctgctggatgggacttacagaaggctgtgggctgttaggtgtgggttctgggagctacaccttcttcttcatgggcagccaacgccctaaccattgagccagttctctagcccctatgtcttaaactagatttaagattttcaaccactcagtcgcactccttagtttgtgtgaattttagatggcgatctagaaatatctgaaaagacacaaatggcgggaatgagaggacagataaaagtatccctaatctgtaatgtacattggaaaaatggagaaggaatctacgcaggccttctgagttcttctgccttctccccctaggtgtgaacatggaacccttgagccgtgcacagcaaccagcaatacaaactgcaggaaacaaagtaatcctttcccacttccttcctcacatgtcagaataaaaagatcattggcttattattgattgagagaacagagatctgccttgtctaaaaaattactcaatttcatacaaaatatccaatattcgcaggtcccagaaatcgcctatggttgttgaccatccttgttttgttaattccacttggtaagtcctaagtttgttcaaaatgtagattaaagtgacctgagaagtagccactgtgcccattgagaaatcccagaaagccaggctgcgtgttataatgacacccagtaaacctggccttctctgtgcctgtcctcactctacaacctgtttactttaagttattattttaaaaaatcactcctccttattttgtgtctttaatttaaaatgtatgacaacgtgtttccttcaaagattacttaataatatcagtagttaagggaaagctgggtatcatcggggttattctgaaaaaccatctcgctcgaagcacagcaatgataagatacaccaactttcagtgactcagaatcttctagtctctcctgtgttgctggaacaagaagctgtcttgtcaccccagttctcttagtgtgaggatttcctaagaatggcatttgagtctgacagaaatctcttcgatctttcagtatttatatatcgaaagtaccggaaaagaaagtgctggaaaaggagacaggatgaccctgaatctagaacctccagtcgtgtgagtatgcaaatgcatacaacaaccaattagcactttctttaaaacaaatgcaattagcactttctttaaaacaaattcaagtccctccatgcccattttagaagaacatttgaattaacacaccaaagctaatttattactaagttttgtggggtgctacacaaaaaaaggtctgcctcctatagccatttgggtctagatggaactggatctgacctgtacacttctttctcaaatagaagaccatccccgctctctactgagctgcacaataaagcatggtattggaaaagatactggaacttgttaaagactcttaccagagtttaataagggaagcagttgttttctgacccctgctgacccagaagagcactcagagtcaccagcagatttaatcaaccagtattcatatgttgccgtcagcatttacaatgacttatttaccagggagctgtcagcctaccggctgcttccagggaatgatgttagactgaattatcacagcacccatgcacacacgtgtcatcacgggtgggggacatgattaaggagcacagtttaagattaaagccgcgcattaaagtttatgattgtgcgtgaatcccaggtatagttgggttgtttgcattgttttctcaaaacaggggggtgggcttctgaaggcaagcttacaagagatacttactaaaatgaaataaatccttataaggttttacataaatactgtagggagaaatgaaggaacatgtgcctaccagtgtgagctgggtagggatgtgtaatgttccctgttttgtggaaatgcaattggctaaagcacgggactcagatttccaaacccccgcaaagattttgctcttaaaatccagcacgtgggagacagagacaggcggatttctgagttcaaggccagcctggtctatctaaaccaggagggtggaacctttcagaatcaaaactgaatgactgaaagagctcatcttaaccacaaaggctagtttcttttgtgtgtgtgtgtgtgtgtgtgtgtgtgtgtgtgtgtgtgtgtgtgtgtgtatagtcataatctctggcaattgtatatatttccttctgaatttagaaaaagttaaatgacatgcatgtatgttttttctctctttgcctctgctttttttcttcccaggaaaccataccaatgaatgcctcaagtaagtctttctattattttatttcacagaagtagctttctttatgggaataggcataagtcggaacaggctctaagattttagagtgaaataatgtttgaattgcagtgacactttaggctttaccgttatgtgaactgtcagttctagccaaagcttaaattgatagcagtctcaatttaaaatatacgaagaagcgataaaacagaatattatgagaggttcaagaaaaacattttcataatcagttagctgtatcacgggaccctttggaatccgatcaaatggaaccatgaactctatacatgtcctcatctctgcaacaacatgtccaattctgtcctgtcctgtcccttgacctgtgactcagccataggggtgaactgacctttaaggtttgtgggtttgctcatcaagtctctagggggcattagaggtgatcttttttttaagcttctgatttcatttcttttttttttttttagaatgaacacattttttatttaattaaggaaagcctgttccaaacatcagaagtctctctataatcctctgtatataaaattaggtcatttaacgtgttctccacattgaaagtatatagatagttccacaattaagagcatttgctactcttgtaggggacctggatttgattcccaacatcctcatagtgtctcactgccatttgtaatttcagttctaagggatgtgactccttgttttgattctatgggcaccatgcacacatatggcacatgcatacattcagacaaaacacaagcatgcacacacatacacacacagtggggggggaagggagggagaaataaagaggtgatgaaaggaggggaggaaggagagagagggagagaactaaaataaaaatcctgttaacaattgcccaaattaatttaactgtgacgtaatagaagcaaaagaacaaggttccaatccatggtacaatgtgttagtctgttcatttctattttacaactcacttttattccttatttaaaatagaaaatacatgttcagtatacaaacttcaaaagatgcactagtataatgtgacatgaaatttcacttcttactataattagtgactgtgcacactgtcagtactaaactttaaacacatctgcatatatctgcttttgtagttatgtgtgcatgtatgcctggacctatgttatgcttgcatttgaattcagatttggggaaagtttagttttacatgaatttgtgtaaatttttttaaatgagatataatggaaactatttaaatgtgcaatataatggctttttaagtcatcaaagtaatttaaaatagttaaatgcctcttaaatatacatgataacttctgaaactaaaagtaatatgtactcaaccaattttcaaaatctatttggaacattaaacacgatagaaatagaaaaaaattcttatgaagtcctctatgaaaggaaactgtgacaagatcctaattatacagaaaccattccatctccaagggagaatatgcagtataactgtggtttcatagaatgaattgggtagtgttccttctgtttctattttgtggaatagtttgaagagtactggtattaggtcttctttgaagttctgatacaattctatactaaacccatctgtatttttttaaagttatttttaagtttgtgtggttatcttcttttgggtttgtttaaagaagattacttcttgctttttcttgggtacagtttccttccttgtgttgaagttttccatctactatcctttgtagggctggatttgtggaaagatattgtgtgaatttggttgtgtcatggaatatcttggtttctccatctatggtaattgtgagttttgctaggtatagtagcctgggctggcatttgtgttctcttagggtctatatgacatctgcccagcatcttctagctttcatactctctggtgagaaatctggtgtaattctgataggtctgcctttatatgttaatgaccatgtcaccttactgcttttaatattctttctttgttttatacatttggtgttttgactattatgtgatgggaggaatatcttttctggtccaatctaattggagttctgtaggtctcttgcatgtttatgtgcatccttttctttttttattagatattttctttatttacattcaaaatgctatcccaaaagtttcctataccctcccaccgccctgctcccctacccacccactcccatttcttggccctggcattcccctgtactggagcatataaagtttgcaagaccaaggggcctctcttcccaatgatggccaactaggccatcttctgctacatatgcagctagggacaagagctctgggggtactggttatttcatattgttgttgcacctatagggttgcagaccccttcagctccttgggtactctctctagctcctccattgggggccctgtgttgcatcctatagatgactgtgagcatccacttctgtatttgccaggcaccggcatagcatcactcaagatagctatctcagggtccttcagcaaaatcttgctggcaaatgcaatagtgtctgggtttggtggctgattatgggatggatccccaggtggggtagtctcgggatggtccatccttttgtcttatcgccaaactttttctctgtaactccttccatgggtgttttgttccctattctaaggaggagtgaagtatccacactttggccttcattcttcttgattttcttgtgttttgcaaattgtatcttcggtattctaggtttctgggctaataaccacttatcagtgagtgcatatctaatgacttcttttgtgattgggttaccccactaaggatgatatcctccagatgcatccatttgcccaagaatttcataaattctttgtaatacgtgagtagtactccattgtgtaaatgtatcacattttctgtatccattcctctgttgaggtacatctgggttctttccagcttctagctattataaataaggctgttatgaacatagtgcagcatgtgtccttattactagttggaacatagtctcagtataagcccagaaaaggtatttctggatcttcggtagtactatgtccaattttctgaggaaccacaggactgatttccagagtggttgtacaagcttgcaatcccaccagcaatagaggagtgttcctctttctccacatccttaccagcatctgctgtcacctgaatttttgatcttagccattctgactggagtgaggtgggatctcaaggttgttttgatttgcatttccctgatgattaaggatgttgaacattttttagatgcttctcagccctttggtattcctcatttgagaattctttctttagctcggtaccccatttttaatggggttatttgaatttctggagtccagcttcttgagctctttgtatatagtggatattattcccctatcagatttaggattggtaaaaaaaatccttttcaaatcttttggtggcctttttgtcttattgacagtgtcctttgccttacagaagctttgcaatttcttgaggtctcatttgtcaattcttgatcttacagcacaagccattgctattctgtttaggaatttttccccagtgctcatatcttcaaggcttttccccactttctcctctataaatttcagtgtctctggttttatgtggagttctttgatccacttagacttgaggtttgtacaaggagataagaatggatcaattcccattcttctacatgataactgccacttgtgccagcaccatttgttgaaaatgctgcctttttttccactggatggttttagttcccttgtcaaagatcaaggaaccataggtgtgtggattcatttctgggtcttcaattctattccattgatctacttgtctttcactataccagtaccatgcagtttttattccaattgctctgtagtacagcttgaggtcaggcatggtgattcgaccagaggttcttttattgctgagaatagttttgctatcctaggttttttattattccagatgaatttgcaaattgccctttctatcccagtgaagaattgagttggagttttgatggggattgcattgaatctgtatattgcttttggcaggatagccattttgactatattaattctgtcaatccatgagcatgggaaatctttccatcttctgagatcttcttagatttcttttttcagagacttgaagttcttatcatacatatctttcacttcctgagctagagtcacaccaaggtattttatattacttgtgactattgtgaagggtgttgtttccctaatttctttctcagcctgtttatcctttgtgtagagaaaggccattgatttgtttgagttaattttttttctttgaatattttttcttttttattttttttccattttattaggtatttagctcatttacttttccaatgctataccaaaagtcccccatacccacccccccccactcccctacccaccgactccccctttttggtcctggtgttcccctgtactgggacatataaagtttgcaagtccaatgggcctctctttcaagtgatggcctattaggccatcttttgataaatatgcagctagagacaagagctctggggtactggttagttcatattgttgttccacctatagggttgcagttccctttagttccttgggtgctttctctagctcctccattgggggccctgtgatccattcaatagctgactgtgatcatccacttctgtgtttgctaggccctggcatagtctcacaagagacagctctatctgggtcctttcagcaaaatcttgctagtgtatgcaatggtgtcagcgtttggaagctgatcatgggatggatctctggatatggcaatcactaaatggtccatcctttcgccacacttccaaattttgtccctgtaactccttccatgggtgttttgtttcctattctaagaaggggtaaagtttccacactttggtcttcgttctcttgagtttaatgtgtttagcaaattgtatcttatatcttgggtatgctaagtttctgggctaatatccacttatcagtgagtacatattggagttaattttatatgtgcatctctttcttaatgttagggaagttttcttctataaatttgttgacgatatttactggccctttaatctgggaatctttgctctcttctatacctgttttcattaggtttggtcttctaattgtgtcctggatttcctggattttgggggttactagctttttgttttttcattttcttttactgttgtgtcaatgttttctatggtatcttctgcagctgagattctctcttctatcttttgtattctgttggtgatgcttgcatctatgactcctattcttttcctaggtatttttatctccagggttatctcccatttggaatttctttattgcttctgtttccattgttagatcctgcatggttttattcaattccttcacctgtttggttctgttttcctgtagcactttaaaggatttttatgtttcctctttaagggcttctagctgtttttaaaggagttatttatgtccttctgaaagtcctctattatcctcatcatgagatgtgattttaaatcagagttttgcttttcttctgtgttgggatatccaggccttgctgtggtgggagaactggattcagaagatgccaagtaaccttggttttccttgcttatgttcttgctgtttgcctctctccatctggttatctctggtattagctggtcgtgctgtctctgactgtggcttgtctcttctgcaagcctgtgtgtcagtactccttggagaccaattctttttgggaggaatttgggtatggagagctgtggcacagggtcagttatggtgcacagacagaaaccaaaaggatccccagctattcctttattcctgtgtcctgatggctctgggtaggtccctcttgggccagggatttgagaagaaatggtggtcttacctgtgctcacaggtgtgtcagcactgagaaaccagatcttgatggtatttgggtatggatcactgtggcacaggatcagctcctggaacagaccaagcttccgatttcataaatgaaataagaagatataaagatgtcatgcatcatgtctggctcagagagtaaattataaaatactttagcaagtttgggaggacaactcaagcttaccctaggggtctcacctagcgcagatgtgaacccggcttctgtaagggggtttctcctagacagacattttcagaaactattttctgtttttcagatcttagcttgagtaaatacatcccgagaattgctgaagacatgacaatccaggaagctaaaaaatttgctcgagaaaataacatcaaggagggcaagatagatgagatcatgcatgacagcatccaagacacagctgagcagaaagtccagctgctcctgtgctggtaccaatctcatgggaagagtgatgcatatcaagatttaatcaagggtctcaaaaaagccgaatgtcgcagaaccttagataaatttcaggacatggtccagaaggaccttggaaaatcaaccccagacactggaaatgaaaatgaaggacaatgtctggagtgaaaactacctcagttccagccatgaagagaggagagagcctgccacccatgatggaaacaaaatgaatgccaactgtattgacattggcaactcctggtgtgttctctttgccagcaaatggtagttgatactcagtgagggtcaaatgactagcaggttccagggactgcttctgttattctctgcagttgctgagatgaaccattttctctgtctactgcaatttttacattcaaatgtccatgaaatttgtattaaatgtgaagtggaatctgcagtgtttgtgtttatattcatatactatgaactgaggagaattataaactgaaacaaatactcgcagttaattgaagaccttccattgatggacagttcttttcctctctatgtggaaatgtataatagaagaaataatttttaaattaaagtatctctttttgcatttctattgctctgttgtcttgcttgttattccatttttctttactctagatgacgacttaaatgctacctgtgcaatgaatgaatctttaaagcttgagttgacctcttaggaggaaattcctttccaaagccttttaataattaaatggttcattctatggctgttactgtcaagaatactttagcttggcagatgtctgatattcttgaggaatctgatgaccgtggtctcaaaagtgcatttaagcagaaagattgcacagcttgggggatttgcctatagttttctctgaggtatgacagttttctctgaggtatgtcctgtccagctttctagttggacagagcagaaggacaaacccagtagagttcagatatgaaactcccacgttttaaggtgagattaagcataagaacatcctgtgccttctttaatgagtttgaacttgaaccaagaactctgagtccctttgaaaaggctttgtattggaggatgtgagtctcttccccttggcttcacccagaggctccgggaatgaccactcccacatcaataaccatggctgtgttctggacttaaagtgaccttttgctccaaagttaccttgcttcagtgattgaatctttttttttgtggtacacatcatgagaaggaatacttatgtcacgtatgggctgcaggaaaaaggactatgtacaaaaggaggtcagggacccccatgggccttgcatacttaaacttctaagcattcttcattagtaaccacagagtcctctggtatttgaccaggccctatgcagtactacattgttagtttccatatagtgatctcgatatggcatacagcacaacattatttgcaattatttcccgtgctctcatctgaatggaagttttcctgcttggattttataccaggggctggaagataactcagtagtagaccaccttcttagcacccttaaggttcttgaatcaatccttactacccaggtaaataagtagatagatagatagatagatagatagatagatagatagatggataggcaggcagacagataattaggaacggaaaggggaagtctacataatgcacagtatttgtagtttctccctagcttttagaacatcagtccactgtattcttgtgttcattgttaatgatatgcccacttctggtctaaatattcctttctaggcaactcctctcttttcctctaatagactctgaaggttcctttaccacactttcttggtgttcagcaatttaacttaaaagagttccaatgtggatttattaatctctttctcctcccccatttcccctccctcttctcccctttctgctgcttctttccctatccttcattatccctgttttcttgagatcttcctctgtggtctaggctggcctgaaatttgtagtaatcctcctgcttcaccctcctaattgttgagattatagtaaacttagttttaactcatttgctaagcagtatgacttttattttattttttatttatttatttttatttatttatttatttgagatagggcttctctgtatagccctggctgccctggaactcactttgtagaccagactggcctcgaactcagaaattcacctgcctctgcctcccaagtgctgggattaaaggcatgctccaccactgcccagctatatttacctttatcccttgagattataattataccatctcgccttccctttcctctctctaacaccttcatttccctctttcaaactcatgtccttatttttctttaatgatgctacatgtgtatatgtttatgtatatgtatacgtatatgtatatatgagtgtacacgcacacacacgcacacacacgcatgcatataccatgtccttgctgttctgaagacttggatcttttctctttgaataactcctgtatgagtccctcaattctttcctcccagagtagagcatcacctcctgtagctttttgaacttctctctgctctgattgtttgaaattatagttttatatgaagatcgtatgtagggagatgtttcattactctcctcaaattaaccattcccattttttatcgttttgtccactgttcgtgacatttctaattatctgtgaatgctcacttatacatatgtttctgcttcctattcatggatattttaaggttacgtggaaagctgtgtctatcagtctcttttcttgttgtaaacaaatatctggcaagaagcaaccaaaggaagaaggcttgccttgtgctttgaatgttcagtcagtctatcatgacaaggaggccagggctgggggaccatggcaactggtcaagctgtgtctgtagcaggaaggagagaccttggagggctggtgctccaccagccttcttcatttccattttattcacactcggatcctggttcatgggatgggatggtgtgcagactctcagtgtgggtcttccctcttctattaagcctatctggagcatacccacaggcctacctagaggtgggtctcttaggtgattttaaatccagccaaggctacagtcacaatcttattccatcatcctactttaaggagtctacagctcttcatgagtccttcctaaaaatacttttaaaattaaattttacttgtgatctcatgctgccaatcataaactcactgtcctcacatggctcccaagaacttatgcatgtgcactgtatacacatttgtgtgcacatgtatatgtctatgtgcacgtactgagatgccatagaataagaggtatcctgatttagcatcctccaccttattctgttgagacagactcttactgagcctggacctagactggcagccagtccaccatctctgcctacttcccattaccaagcttacagatacatatgtgccataactgccttttacaggagttctaggaatttgtactaaggttacctgttgagccacatcactagccatactcatgtgaccttcttggtgtatttttgaatttgaattgtagatctgaatgacaagtcttgtatttatgtgtactaacttcatgcatagaagatttattatttattatttattatttatttaccaactcctccagagactcctgttctgagccaggatttcttagtatgttgggacttatatctttcaataatttccgggttcaaatagatttgtgcaccagaagaaggaagtttggctcccatattggtccaactttcttatgccatgcggtgtttagatggaacttagtttaagctgtcctttggcaccaactctgatagtttgttagcaaagggatttgactaaggctttaactctgtcatacctctggcttgtctttctgtttccagtgatctgagaatagatcacacagacagaaatttgtgtgaggtcatgtgtcacacttataagctagcatacatttttcttttcttttttttttaattagatattttctttattttcatttcaaatgctatcctgaagttccctataccctccccccaccctgcttccctacccacccactctcatttcttgaccctggtgttcccctgtactggggcatataaagtttgcaagaccaaggggtctctcttcccagtgatggtcgactaggccatcttctgctacatatgcagctagagacacgagctctgggggtactggttatttcatattgttgttccacctatagggttgcagaccccttcagctccttgggtgctttctctagcttctccattggggactttgtgttccatcctatagatgactgttagcatccacttctgtgtttgccaggtacttgcatagcctcatatgagacagctatatcggggtatcttcagcaaaatcttactggcatatgcaatagtgtcagggtttggtggctgattatgggatggatccccaggttgggtagtctctggatagtccatctttttgtcttagctccaaactttgtctctgtaactcctttcatgggtattttgttccctattctaagggggaataaatatccacacgttggtcttccctcttcttgattttcttatgttttgcaaattgtatcttgggtattctaagtttctgagctaaaatccatttatcagtgagtgcatatctaatgacttcttttgtgtttgagtttcctcactaaggatgatatcctccagatccatccatttgtccaagaatttcataaattcattgtttttaatagctgagtagtactccattgtgtaaatgtatcacgttttctgtatcctttcctctgttcagggacatctgggttctttccagattctggctatcataaataaggctagcatacattttcattggtttaaatgcttacttagacctcttagcagttcagtgcttggatgaataccttggttctaggcagaaagaagataataaactgtagtgagctgatttgctgtattatataaagtgctgatcctatgaagtagttctgttggggtatgacaaaccccttccagataccctccagtggaaggctccaaagatggaaacatactgacggaggttgtgctgtcacctgaaacaccttggagatctgtgatgtagatgttatgtatatttataagcttttgggacagaagggttttccttcagatatagtcaactttgtattttaaagtagaaactgggatggggcgagggcaggtagctcagagcgtaaagcatttggtgcgtgtgctttccagcctgaatttgcatccccagccctaaaagaaaccagtcactgtaatggtggcacatccttgtaaccccattgttggaaagcagagacaggtaatgccagaagctcctgaccagctagtctaccagaaccgtgggagtaagatgtgttctcaaaccaaagcggtggaaagcgatagagggggacatcctaagtaagaatggctacatgtgcatgtgcacctgcgaatgtgcacgcatcacagacacgataattaaatatgttagaagggaagatgttagttaaccaagtgactgcaaggagacatgctgattgtgtgtgtgtgtgtgtgtgtgtgtgtgtgtgtgtgtgtgtgtgtgtgtgtgaatatgatgtatatgatgtattcagcttttatatcacctgtttactttctagtcagaaagacaagatcttcattctagacacttcaccatcagtaaaataacggtcaatctctaactttgtttctaatataatactgctttagggggaagattttttagtgagaggagacacgtccttgatactttgagcttcattagaagatgcctccagttacagggtagaaggatctacctgagccacaagtccagaatcatacaagtggacaaaatggtcctacaccccagtaaataaagtgagaaaaaatatgaatcacttgactgttggttactatcacatgacttaattaccttgtttttgatgagtaaatccatgaaatgtaggataaaaatgtctcagctccagatatatccatttgcctaagaatttcataaattcattgtttttaatagctgaatagtactccattatgtaaatgtaccacattttctgtatcaatttctctgttgagggacatctgggttcttaccagcttctggctattataaatagggctgctatgaacatagtggagcatgtgtcctgagtgaggtaacccaatcacaaaaaaagtcacttgatatgcactcactgataagtggatattagcccagaaacctagaatacccaagatacaatttgcaaaacacaagaaaatcaagaagaaggaagatcaatgcatggatacttcattcctctctagaatagggaataaaatacccatggaaggagttacagagacaaagtttggatctaagacaaaagaatggaccatccagagaatgccctacccaggggtccatcccataatcagccaccaaatgcaggcaatagtgcatatgccagcaagattttgctgaaaggaccctgagatagctatctcgagtgatgctatgccggtgcctggcaaatacagaagtggatgctcacagtcatctatagcatggaacacagggctcccaatggaggagctagagaaagtacccaaggagctgaaggggtctgcaaccctataggtggaacaacaatatgaactaaccagtacccccagagctcttgtcgctagctgcatatatagcagaagatggcctagttggccatcattgggaagagaggttccttggtcttgcaaactttatatgctccagtacaggggaatgccagggccaagaagtgggagtgagtgggtaggggagcagggagggggagggtatagggtacttttgggatggcatttgaaatgtaaatgaagaaaatatctaataaaaatttttaaaaatatgtcttaatatatcctgaatgtgctatggtaaatgatttctttacatttattttaaaagccatgcattactagtcctttattcctaaaagacagataaaaatggaaatccctgtgtttgttttccctcttactaaatgtaaaaaaaaaaaaaaaaaaaaaaaaaaggtctcagctataaaataaaaggcccaaggatctgtcaataaaatataacagtgggctccaaacaaatgggaaggaaagcggggctgtggttccacacggccacaagatggcactgtttctccagcactgactcaggtcctggttgaaagtttctccaaagtatgtcacagtttaattctcatattcaacttgccaacaaaagagcaaaacaaagcagatattacaagagttttatctaaaataaggcaatgtctgattctaagtcaacccctttttatggcctagctgtataattttagatttaacatcttggatgttctttatccatatctgtaaattaaagtcacagtccatcagttgttcctataactgtaatgcacaggaatgagacacccatgagaggatgtgataaactgtaatagagtatgacattggttcttaagattaacgttcatagaaaccacctgaggatgtttggaaatgtgtcctgcagatgatgtggctttgggaagggggggggaagcacttgtctcatacccatgagtccctgggtttcatgaacagcactctaaaattcatatccccaggtccagacatgcttcagaaggtttgagactggaaatattcatgtgctgcataattaatcagcaattatgaaaatgtgcaaagtctcgggtcacagcctgaaaggcttcagtatgccaacacccatggaaagaaatatttccaacttagagattaattcactatttaactaaaagttgaacaagcactccaccatttttagactaactaaaggtacgtgtatattatattataatacaaatatatcaagtgtaagtgcccattctcttaagttaatagaatggacttgagaaggaagtgtttgctgggtgacagtcagataacaggaccaggtgcagaacatctggaagtcagctgatagacaggtatgctcatgttgtaggacccagacagagttgatggagtccccctgtgctctgccttgtgacccctatacactcttatttgtctataaacaagtgacttggtgtcttctattaaagactgaagcaagctctactgtactgaaagagagtgagaaaatttagcaacaaagttccatgaacctcttagaattctttgtcacacaactgccaaggtttgttggctaaagccaatggaactttttctaatctcttctcttccttctccgtctgcaaggggtctcagtctggttcccagaaaacatggtgggaaagattgaaggtctagctctaggccagaggccagtgtgttatcctcagaacctgggtgtgcatgctcaaatcccatcttaggtatcaagagtgcacaacaacaaagtctttacaaattgcagcaaaaccggcttcatttggaaatatattcaatactcatcaataaagagagacagcagtttatgttgaaccactaggactcttgatctttctacaactatctatcaaatagttcttactttttacagctaggcactattctaggataacatgctaataacatgctaataacatacaaaaagaccaccaatctggagctggatctctcataacaggacggacaagaatttgtgtaatgattgtgcagaatactatgttatgagattataaatgctccgatccgtttatcaggacagggagaattgaggcaaaggtagggagagagagaaaaaaaaagcaaggtgtgttactactatatagagtggtcaggagaggcctcagtgagatggagcaaagatttgcagcagggtggcctaaatctgagggaggactggaacaaacgccaggacaagccaaacacgcgtgagggtctgcaacggggtcagtatggctgcagtgtacaaaaggagaagcatgacaaagagaggtgacagtgtccagatgcctggagctggtcttgttgagggacaaagaccttgccaatgcatcttcctatttccacagctaatgcaaagataaattgcatggaccagatacttctattgtgtagctttattatttaaacaaaatttctggggctgggggaaatacaacaaagttgcgggtcttcaggaaatgaacgttcctttggaaatgagaggttatgagacatggttcccgatgagatttaggacctaagggtggattggagggtgtgcagagagtgctgcttgaatcagcaggactctgaagaagctgttgagagagtcccactgcagcactttctccagttctgctgaattctggtccagggcatactctgccctggtgcttctccatcctctcccatggcctagcacttgactgacggacacatcacaccttactcattccttcaggagaaagggctttctcaagaacttggaaatcggaaagtccctttcttcccttttgtttttaatctaggcaaaagtcacataacataaaaaccaaccatcataaagtatacaattcagtggtatttagtatttcacaacattgtgcaactttttttttttacttccatctggttccaaaagcttttattgcttcgaaggaaagctagtgtgtactaagcatttacacacacactcccacacccccgctgtcccctagccccaacgccccatccgcaatcatcagtaagaagatttctgtctttaggtttagctattctgaggatgtcaaaacataatcatgctttgcacagccttatatgtggtgcatctttcaagagagaccatttcttagcagtaaaaatgctcaagtgaagactgcagagtttagttgctccacagtcgtgcaatggcatctagttctatcgtgtactagctgagtcaaagaggtcagatctcttcaactttacaaagtgacatgctagaaataaaatgctccttatgcaactcaaatgcatgtatgtatacatgtcaagtccaagtatgtcacatgtgtgtgtgttgtgtggcgtggtgtgtgtgtgtgtgtgtctgtgtctgtgtgtgtgtgtgtgtgtgtgtgtgtgtgtgtgtgtgtgtgtaggggtgtaataagagcccttctgcctcccaaggtgtctaattatgcttggacaattaagaaaaatgtgtgacattggagatggcacagatacatcatctcaaagctgccgtaacttgctttttgccctgtcaaaaccaccacaggctagaatgaggcagttcactgtgcttgtattcccagggcgttattaatggagagtgcagatgtggtcttgttcttcagtttatggtataacacaagcaaaaatgaaaacaaaacaaaaaaaaaaactcttttcattgctaagtagcctctctggtacatcacatccatgggtccctcggtattgggaattcagagacagcaatctggg

SEQ ID NO: 112 - DNA, 1479 bp, Mus musculus
gccgcaggctgcccacacaggccgcccgctgttttcccttgctgcagacatgctgtggatctgggctgtcctgcctctggtgcttgctggctcacagttaagagttcatactcaaggtactaatagcatctccgagagtttaaagctgaggaggcgggttcgtgaaactgataaaaactgctcagaaggattatatcaaggaggcccattttgctgtcaaccatgccaacctggtaaaaaaaaagttgaggactgcaaaatgaatgggggtacaccaacctgcgccccatgcacagaagggaaggagtacatggacaagaaccattatgctgataaatgcagaagatgcacactctgcgatgaagagcatggtttagaggtggaaacaaactgcaccctgacccagaataccaagtgcaagtgcaaaccagacttctactgcgattctcctggctgtgaacactgtgttcgctgcgcctcgtgtgaacatggaacccttgagccgtgcacagcaaccagcaatacaaactgcaggaaacaaagtcccagaaatcgcctatggttgttgaccatccttgttttgttaattccacttgtatttatatatcgaaagtaccggaaaagaaagtgctggaaaaggagacaggatgaccctgaatctagaacctccagtcgtgaaaccataccaatgaatgcctcaaatcttagcttgagtaaatacatcccgagaattgctgaagacatgacaatccaggaagctaaaaaatttgctcgagaaaataacatcaaggagggcaagatagatgagatcatgcatgacagcatccaagacacagctgagcagaaagtccagctgctcctgtgctggtaccaatctcatgggaagagtgatgcatatcaagatttaatcaagggtctcaaaaaagccgaatgtcgcagaaccttagataaatttcaggacatggtccagaaggaccttggaaaatcaaccccagacactggaaatgaaaatgaaggacaatgtctggagtgaaaactacctcagttccagccatgaagagaggagagagcctgccacccatgatggaaacaaaatgaatgccaactgtattgacattggcaactcctggtgtgttctctttgccagcaaatggtagttgatactcagtgagggtcaaatgactagcaggttccagggactgcttctgttattctctgcagttgctgagatgaaccattttctctgtctactgcaatttttacattcaaatgtccatgaaatttgtattaaatgtgaagtggaatctgcagtgtttgtgtttatattcatatactatgaactgaggagaattataaactgaaacaaatactcgcagttaattgaagaccttccattgatggacagttcttttcctctctatgtggaaatgtataatagaagaaataatttttaaattaaagtatctctttttgcatttc

SEQ ID NO: 113 - protein, 323 aa, Mus musculus
MLWIWAVLPLVLAGSQLRVHTQGTNSISESLKLRRRVRETDKNCSEGQGGPFCCQPCQPGKKKVEDCKMNGGTPTCAPCTEGKEYMDKNHYADKCRRCTLCDEEHGLEVETNCTLTQNTKCKCKPDFYCDSPGCEHCVRCASCEHGTLEPCTATSNTNCRKQSPRNRLWLLTILVLLIPLVFIYRKYRKRKCWKRRQDDPESRTSSRETIPMNNLSLSKYIPRIAEDMTIQEAKKFARENNIKEGKIDEIMHDSIQDTAEQKVQLLLCWYQSHGKSDAYQDLIKGLKKAECRRTLDKFQDMVQKDLGKSTPDTGNENEGQCLE

SEQ ID NO: 114 - DNA, 45154 bp, Homo sapiens
agttaaggaaaattgttgggatcttagacttaagctcaaagcctccattcaaagaaagtggccaaaatgtcccccctctggagcaagttgcattctgattaggaatgagactcaagccatataaagtcaagtacagttacaaggcaatgataagaaagaatgagatagctcaattccaaatgaatctggatttatctgatatgtaaatttaaaaagagagagataattttcccagactccaaatgccaaatcagtttcactccctcctcaaaagtgctgagaaagttctaaatttggaaaggtcacaaagggataaagtgagtcagaggaggctttggtttgccttatatgaaaagtgggatttggactatggaggaatagggtccttccagaggggatgtttgaatgacagagtaggaacagggcatggggaggccaactgcgaggaagtcagcacaagcaaagggcaggcccagcaatatccaagagagagcggggccagtccacagggtgttcagtgtggagcctccagacctgtgtcctaactcgagctctgccacatactagctgtgtgcaaattagttaaactcacctaacctatgtttcttaatctgtaaaatgaggataatattagatgttaagattaggtgaggatcaaatgagacattgtgtgcataaagcacttttcctgtgcagttaaacccttgataaatattagccacttattaaccatcgggttaagagagaaatgacttttttttttttaaagaactggccattgctttatcttccatcgtcgtgatttatactttttaactatattcacaccaggaaaagttgatagtaaatttcattttgggtgaggtctagactagtatccgtggaaaggaaggcaaattgaagaggtatgatcctaggacagaggaagaaccaaggtcaaaacagggacatttcccaattcaatccaacagctgctttgttaacagtgccacaagcagtggggtgggcagagtgggagacgcatcatatcctgggaagggaacactgtagggagggagagagaggctggatgggggaaacggtagataaaagattgggcaaagtaatttagtcccagtcccagatactacgtgtttcagtctgtgctcgtgggtatgtaaaggtttcagatgggctttccatgaaaaacagcaatgaggcaaaccgtcccattcactaaaaagacaggcattatcatgatactgtgcaaagagcccaggctttagagtcaagcaaatcttgatacctttacttgacacatgaacttgatcgagttacctctatgtgaatcaggaaagttattctttccctgtaggtgtgggtatgagaattaaataagttagtatatataaaagggtctaacacatagtgagtgcttgattaactggtatgtgttagttcaagaaggcagtatgttgttatatgcgagaagcaattgctttggttcaaaccccagctctacagcttactggttgggtgactactgcaagatcctcaagtgcttgggcccatgtttgtttcacctatattgtgcacacaataagaagacctacctcccaagatttttatgagcattgaatgagatcatatttataaaacccactaaatggtacctggctcatactaagtgatctaaatgaagaggtattatcattaagaagcaattaaaagttgcatgtgtatgaagttaacagcttttaacataaaagacaatggattatttggtaagagatctcaccgagcttaaatgtgtttttttctttttttttttgaaatgaggaaaggaagacataaatggcagaatatgtggtacagaactgtaagatacatgtcccacgacagaaataaaaaaggcagagattcactgaggggggaattcatggacatttatggtcacattatcctgattggctgagggagtcagcaggcttctagccagttttcttgctgttcacagaaataaaagctcagtgtctttgaaaatgaactaagtttttttttctttttcttgataggaaaatgtatttatgtagtcaagtaagacttgtttctgctaagtaaaaattcagcctaagcagtgtaatatgaagctaaatggagactggatacaaatatgtttataatgagattactgaatttgttgatttccctacatttcccatctactaccactaaagaaatgctgtaataataatataactggccaaagtggtaaaagtggggttaattggtccttatctgtttgaggtaaacaaccgaactgatgagtggtttccctgagcaaagactcttgctacttcatgtgtcctttccagaacgtggcatcaacatcacatgggagctggtgagaaattcataacctcatacttagacctaccgaatcagaatcttaatcttaataatattgacaggtagtttatatccatattgaggtttgaaatgcactgagttagagtgtggagttatggccacactgtcttaattagattatctttatttcaatccaatttgcatggctatgtgagctatgattcttagaggagtgaacataaacagcaaaaattcttacttagcagacttacccagtgcaagaaagagttcccttatctcactgtattatgatcttagtcaatatgacccggaatttaagaaaataatatgacaagagtatggttttaatcaaccggaaaccatgtgttcaacagaacaacaaaacaagaaggctttgtacttacttagggagtttacatcttgatgataaggccactgaggtaactaaagaggaaatggattcagcataggctttggaagttcacttctgttacctagtaactgtgtgactttgggcaagtctttccaagtttcttttctataaaataggatggtaacaggacctactttacagggagttgtaaggtttagataagttaacaggttatgcaaaaaaaaaaaaaaaaaaaaaaaaaaaacacacacacacacacacacacaaatgttctggacattttataagcattagatattactgatatcttatttttgtttatttttaaatgtctgtccctttaaaccattcctttcaacatatttgtgtggtttaaataaaaataagtttgaagaaatttcagaaagaactttgataaacccattgaatgacttggaaattccaaggggatttcaaagccaggtggaggaatgcctgcttagtgtctttcctcagtgcaaaggctgataaaggcctcaatttctccctcagtttactgtgatcagagacttaggctgcctagttatccttgttgcctggacaaaaaactctttagatgcatgcaggtttgtgtagagtttgtggggaggtttcagatggtaaaatgcctcttcctacctcaggtgaggggagggttactatcattcctttttcacagagctattctagttctgtttataagtagtgttctttgtatagtggatgttgagcaaacacttgttaaactataggaagttataacatcgggagaatttctaacaactgcaaagtgttctgatatgtaataaattgccttgagaaatagtaggagccagtgctggaaggagtcaagctaaggctggtgtagtctcctagggctgttgtagagaagagtctaaagtgggaggtgttgatcttatggtcccagaggtctctcccacactacctttctgcctgtataggtcagaatctattaagagtgagtaggaatggattacaccccacagtcatgaagggccttaaatgatagtagcacactagtgtcatatgtcaagtggcaaatgacactagcaccaaatgtgattctgcatttaagttctaagtattaaatgcatctatttgctatatgaaaacataagatatcccagtgtttgcaaactggttcaatattgtgttgatttttgttttgctttaatacactaagggaacttcaaaaggctgatgtggtccatgctctctgagccaggcctctcttgacttcttatgtttagttattcatgaaaccactgggcctgtctaaatggccaagtcatataggaagagacagagtgaaagggagagcaagagctagagtgagagaaagagagagagacatcttctcaccttcagacctgatcagaggcaataatgggagaccatgggaggggagagcctgatctgatgattccttttcagttattttctggaaagtttaaaaaatatggtattcttcatggagaagccaagatgttaggctgcaggcagtgcttatgctctctagcctagtgaggaggaaagcagtataggtaaataaaatgacatttagttggtaatataggcagggcctatatcaactgccacctataaaaggcgttggtgatggtctttagggggccattggcaaattgctacaacaaaataataaaataaataaaataacaaaatccaagtttatctcccagaatctatctgggcatatcattactgttggaaagacttatgtttaccaggtgagaaaactgatgctgagaggggttaaatattatgcacagcttctcacatctagtgaagtaactgaactaggatttatatctagggactctgtccttcataggacaagttgctaatttgggggtgttctcagggagaggaaaatgtctatatgctcatatgcacagattatccaaatcaaaactctttctccccattgtcctttctcagttgaactagatgttaataccactattgtattagtcgactaagattgccttctgcagaaaaccacctatgtctcctttctacccaagtgctctggggctcctcccctgcccattctcctccaacatcccattccacattctctttctatctctgcaggactccctgtagtcctccctgcccatccattatctccctcaagctgtcccctcagccttttctaacagggaaaggctggtgccctggtaaagagtcccccacccccatcccactccctggcactagatgggcttgggagacaatgactgcccctccctcatgctgttctgatgtctcttgttccttccagtcacctcccttccaggcccatgaggagggcctgaggcccacactagctagtcttttctctggaggttgtttgggggcagggaggaagtctaaagtagagagaaagcgctgccatgccttaagccaacctttccagaagtataatgcccttgccactagtagtttgggaaacaatttttattggcatgcaggcaaatattttgtttcaatagtggcatatttatttttatggataccttctatttttggcaaggaatgctgattttccatttatggttataatgtaatgttttattttaaaaacaaaatgacttagggaacaaaataagttgacttaaaaataaattattagttaaatatatatttagtatatacaagtagactacagaaatggcaaaatagattgaagttgaagaaacattgccttaagctaagcccactcaggatgaaattttatctgcccccaaatcaacatctcttgaaaagtggtccctatctttccttgtgtcagttcttaacacccagggggtaggcatgcttctcatgtttgttttcatagaatatctgtgttttcaggggaccaccatatgcaaaaatgtcaggggaggggtactcaattggattaagaagccagggcccacagaacagatgttttcaccctactaacccaattgctgtctgctttttagttgccacagtctaaacattctttaatgcattgtctttttcagtcattgctcaagaggtaggttagtataccagttttcatagtgggaaaaattaggagacttaataatttgctgcatatcttggtggccaagttttccagccctggtcagttaggctttaggacacttttcttaggcttcaggaatgtgagcatggaagtagtacagaaaggaagtagtacagaaaggaagtaatacaggaaggaagtagtgcaggaaggaagtagtgcaggaaggaagtggtacaggaaggaagtggtacaggaaggaagtagtgcaggaaggaagaagtataggaaggaagtagtggaggaaggaagtagtacaggaaaagtggttgtaagccatttaacttactttttttcatctgaactgtgacccccaaattatcaatttgtcttgtgaagtcacttcatttaggaaaagcaatgtaaaagtaaaaattagtatttattgtgtgtactaggtgctttgcatatgtcatttctttaatcctgtaggaaataatatgttctccaggaggtgacaatgtctatatgattagattcacagattacctatccaaatctaagatctccgtcctctctcttcctttcccaagaacccatacatatttctattaattggtagaaataattattaatagactttgtcacttggccactgtgggctctgacgccctctagtgacagaaaaattctttggtagaagaagtaatatccctagatagcagtctacagaattgtttaagcaattatctttacttgagcttgaaactagaatagctaatttgtaacaattaacttttgtaacaaaagaattattatactgatcaaagttctgataatttatcagttaagattttttcagttgtaagaatctagcttaagcagaaactaagaatttgtagagttgggtaactttgggtggtccagggttcaatttaagaaccaaatgcatccagaacttggatagctctaccaaccttgatctttcagcatggtttcctctcagtgtggtttcctctcagcatgagttgactgttttcagctctggcagggccacaagctcccttcacaaccaaccacatcagtttcacatctcacatatttctacttcaaatccaatgaaaaagaaagggtttgtgtcccagtgtttccagtaaagatcccaaaatctactccaactgaatgtgatgtgctgattggcttaagccaagtcacatttcccacccactacctccctccacctacacatatacccaagccctgggattggtaccaatgccactgtgatggttaattttatgtatcaaattagctaggccatggcacttggctatttagtcaaacactatcttagatgtttctgtaaagcaatgttttggatgggattaacatttaaatctttacactttgagtaaaacatttgctttctataatgtcaataggccttatccagttagttgaaggccttaaaaaagaaaaaaaaaaagactgacttccactgagtgagtgagaattatgccagcagacggcctttggacttgaactataactttttcatgggtctccagcctgttggccaatgctaaagttttggacttgccagcctctacaatcatgtgagccaactcctatctatctttccatttattcattctcttggttctatttctctagagaaccctgactaaaagaaccactcacatcaaatagttaagaagaggggagagggacagtttttctaaagacaacttggaagtactattaccagaaggaagaagaaggagaaaggcaggataaacagtcatggatatacactatagctgggagttattaaaatcaacttattgcaatttagtaaaaacaatttggttgacaacattttttaaacattaggaccaaaggggaaaagaacaaaagtcttagtggtaaaaagatgtagaagtttttttttttttttttttttttaatcttaactcttcctgtttttttacatagtcaagattcttgtttaagtgttattcagaatgttcagaaaccaggatatcttttgagtagaagctttaacttatatggtatggtttgaataaggatggttgtccaaaacatctccaacatctgttggagtgcctgaaattctattattaaaattttatttctttgcccttgaaggcctgaggactctcaggaatatgctggtaaaataaaaataacctttagagatgcccaaactgttttccccagaacaccagcattcattaggtgttcattcaatagattcttcaaaggattccaaaggcaaagaagtttggggaacagtatatataattacccaaccctttgacattagcatactaagggccctgagaagttttggattaagaaagttttcaaattaaagtaacccagaattttctaagattatttgaccatgaaacatatgtctccccacaaagcacatattcctatctccttgaacttgaggataattagacgtacgtgggtagagggtaggggaagggggtatggcatagaaagagcaggaccttgggagcaagaatatctaagtttaattcctgactctgctatttattaactaaccatctttgccaatgttgcttaagcttttttggctacatttttttatttgtaaagtaagtttaataatcactcatctcactgggctataatgataagtattaagtaaggaagatccacatatgtgagttgctggcttataattcacactcaagagatactgattttgtcaattgtcctttcccctttttttctctcttccctccttccattccttcttcccttacctctcctttccttccctcacaccccttttccttccttctttttacatttttttatttaaatgaacttttcattttggaatagttttaggatttcaaaaaatttgcagagataatacagagaatgcccatataccatcctccttatcccacttctttttgtgtctattagatgctcagagtgtgtgcacaaggctggcacgcccagggtcttcctcatggcactaacagtctactgaaaggtggaacagagacaagcctatcaacacctacaagactggtggtaagtgcagtgacagatgcaaaacacagggtgatggaaagccctcaggagggtaacctaacctagatttgagggcccaaacaggctccagaagaaaatgtcaactgagaggaagcctgaaggatgaacagtgggctaagcaaagggttattaatgtgttattaatgggttgaatctaattgggaagggagagaggttgcagagtgaggtgcagagcttggtggacgatgccaaaggaatactgaaacctttagtgtgtccagtctggaactgcatccaaattcaggttcagtaatgatgtcattatccaaacataccttctgtaaaattcatgctaaactacctaagagctatctaccgttccaaagcaatagtgactttgaacagtgttcaccagagcacgaaagaattacaagatttttttttaaagaaaattggccaggaaataatgagtaacgaaggacaggaagtaattgtgaatgtttaatatagctggggctatgcgatttggcttaagttgttagctttgttttcctcttgagaaataaaaactaaggggccctcccttttcagagccctatggcgcaacatctgtactttttcatatggttaactgtccattccagaaacgtctgtgagcctctcatgttgcagccacaacatggacagcccagtcaaatgccccgcaagtctttctctgagtgactccagcaattagccaaggctcctgtacccaggcaggacctctgcgctctgagctccattctccttcaagacctccccaacttcccaggttgaactacagcagaagcctttagaaagggcaggaggccggctctcgaggtcctcacctgaagtgagcatgccagccactgcaggaacgccccgggacaggaatgcccatttgtgcaacgaaccctgactccttcctcaccctgacttctccccctccctacccgcgcgcaggccaagttgctgaatcaatggagccctccccaacccgggcgttccccagcgaggcttccttcccatcctcctgaccaccggggcttttcgtgagctcgtctctgatctcgcgcaagagtgacacacaggtgttcaaagacgcttctggggagtgagggaagcggtttacgagtgacttggctggagcctcaggggcgggcactggcacggaacacaccctgaggccagccctggctgcccaggcggagctgcctcttctcccgcgggttggtggacccgctcagtacggagttggggaagctctttcacttcggaggattgctcaacaaccatgctgggcatctggaccctcctacctctggtgagccctctcctgcccgggtggaggcttaccccgtcttagtcccggggataggcaaagtggggcgggcgcgggacgcgtgcgggattgcggcggcagcggcgcacgcgggcacctgggagcggcgggctgctgcgggaggcgttggagactggctcccgggggctgttaggaccttccctcaggcccgggtgctcagaacgctggaggacttgcttttcttgggccttgatgcgaagtgctgatcccgctgggcaggcggggcagctccggcgctcctcggagaccactgcgctccacgttgaggtgggcgtggggggcggacaggaattgaagcggaagtctgggaagctttagggtcgctggagggggaccccggttggagagaggagcggaactcctggacaagccctgacaagccaagccaaaggtccgctccggcgcgggtgggtgagtgcgcgccgccccgcgggggcggggagagagcctgcagccttcagaacagatattgctcattttctggcagttctcagacgtaggaaataagtcagcaccgaagcagtggttaagccggagggctcggaagaacggcaccttttctttctcgaaaaagttatatgggggctgaatgagcttctggaggcttgtttaccgttttttattgtcacacagaaaaggaaactgccttgtctcccttccgggaattctctctttaagactgtaagtcgctgcctgagtggtttcattttgttttgtttttctgcccttctctttcttcttttgccctttcttagcttgcactcccatggtgatttctgcttggtctcctgctggggttggtggtactcgttcccaccgcacagaacccggcgcctattattggccaagaaacttgagcagcctgttttgaaaagtccctcgctcagaaatgccagcttgcagatggctaatcaaagagacgtggatccaggaggctcatttgagtaccggagcctctgagagtccatggatttttattttattgggccccaacaaagtgccaggcatagcgagagaagtgtttacaaatgtgatctccgcggattctcacgagagccatgtagtggggaagataaccacatccccattttacagatggcgaaatgaggttcagagagcttcagtaattcagccaagatcacacagctagtaaatgggagatatgggattgaactcagatctaattccaaaactcaggctgttcgctgattgcatctgatatccagattacaccaagaggctgagatgtctgggtccattttatgattagaaaaaaaaatcctgttcctttcagaaatagtgtgcactatttgggattctttagaaacttccttggagaaaattaatgattcaagattgagaaaacatttatacaacctcaggccacactcttctctctcttgttattaaccattgcaccactgctatgttggctgctttgaaaatctcatagtttttggacagcagtattagtaaagtgtaagaaaattgtcaaagcttggagctatgcttgttgaacttttgtaccaatagcacctttaccagaggctgcgtgtttaaagcccgaagaaaactttgcttttctgaaagaatacacacacacacgcatatgtaaatattcatacatttatgtatatatacatattataatacctataagttaggtataacttatatttgtatatgatatatggcctaggaaattaaggcttattaaataaaatttataaatgcagatgagtcaaatacaaagatcagacataactctatcacctaagtaatcattgtttacgttttgcagtttatcttccatttctcccctctaatatgactcttttaaatttagttacacagaaattggttttgcgctcacgacatgcctaacatcaggcctttatccttaaagaagtttcaacactcttgtgtcacctcatgtgtctacagaaaatgtttgcttttatgccttcacggttatgttttcttagtagtagcaataaataaaatagatgcaaagtgctaattacttggaatacagaagcaaattttaattctattaatgggctggacatagatgggtggggagctgttttctgcttttcccctcttcccctagtcctctgactctggtgataactatagtcaacaagtatccccatccttaaccccttttgcttctctttctctttccttctctcaaccttcctggtgttagttttctctttcctatttctgagtgtttttactccgacacttacaataaaaaagtttgaaatcccaaaaagttgacaaatttctaaaggagacagaaaaagagtcaaacttactttacaaattaatttgagaaatagctgtgggttgcattttttttttttattgtgcatgaccctgttattggccaagaaacttgagcagcctgttttggaaagtccctcgctcagaaatcccagcttgctaattgaagggatgtggatccatgaggctcatttgaattccgaagcctctaagagtccatggatttttattttattgggccccaacaggttttgtcttgcattatttaggacattggccaggcaatcactggacagccagtttgctctcctttacattttgtagaatggttatcttatggtcaaaggaaagggagagggcctttggaaaataaagctgtgtatttacaagcagtcatacagaatagttttgtggggaaaataaagaacagttatttaatttgtaatttaatcatttttcttaaaccaacccaaagagcataaaatggaatatttatttatttttgtagcttaatttgtaatttaataatttttcttaagccaacctaacgaacatattgggctgtttattttcatttttaatgggccatatttacatcacaaaggacttgagaagtcttacaaatacaataaaatgataaaatatgaattaagacattagcaaccaggatggaaaaacacaaatttgtaaatgatggccaggtttgcaagcaaaaattaaattgataaatggcagcacccccactaccagctatagttagactgatgaaaaatcctctaatgttcatgcctgaaatacagttaccacccttagcagcaaattagaggcaaagaagttctggaatttggacgttgtctctgagtaagctctttgagacactggacaagtaatttccttctgaatactcttatactgacacataggagaagtgtcagtgtttcaaaggaatctctttgaaggctactacattgctttaggggtgccagattaccagagtaaactgccagtttgagagaataactgtttcttaagagatggtctgaaacctaagtaaggaaatccccccacttgaaagcccctaggaagttaattgcttttggcaaattatcttgggccccaaaagtcccttgatgagcacatgttttgtaataggtactaaagactatttacttatgatgaaaaataaaataacacaatttaaaacttgaaattgataaaaagcaacttgaaaccaaatttaggacagtgaacccatccctttcttatttttaaataggtaaatatagaaaaaatgaccacatgatgtgaaacaaaaagcaaatatttaaaaactacatttatactttatctcaccacactaatgtaaagaattttgattttacttataaattcttagccttgtctacacatatacataattgcatgtttaatttgagctatatatagtctgttttttgttcctttgcatgttacacaaacctttttctatttccacataatttttatctcatattttttattggatacattatagagagagcatttattaaatgagctgggattactataatttttattatttattttttaatttattacttatttttataatttactattgaaaaaaagcatttcttaaatgtactgggatacatatatatatatgactttttcttgttactaaaaaattactcatagaacttacatattaaaattttaggacttgtgatgaaaaataataaaataatttaaaacgataaaaagcaacataattttatatgttgtaccttgtacttccttataaggtacaacactacaatagccttagtgtgtagttttctttttgctatgtatgtatatatatattcataaaagtggaaaaataacatttaataaatcctctttattttctggaaaatccttgctttaaaaaaagtctttagctttttatatagttctacttctaacaccaattaaatatcttcaattcagtctcaagcaggaacaaatcttcagtccacttgcctacctttactgtctttgaagtgacagtgtgagtagtaaagcccaaatcagagagaaattgacttttgtaagattggtaacttcaccttccccggaaggaaatgaggtggttcttccctttgatcacaactgctttcttgatttgaaataaactgttgtacagcccagtcaccccatctttagacatttagaaatggcaatcatagttatataggacaactagcctgagtcccactaagtagaaatgatagtgaatttagtataagattatacctttaggctgggcaggtgactcacacctgtcacccagcacttcaggaggccaaggtgggtggatcatggatcacttgagattaggagtttgagaccagcctggccaacatggcaaaaacccaactctactgaaaatacacaaattagctgggtgtggtggcgtgcctgttatctcagctactcgggaggtcgcggcaggagaatcactggaacctgggaggtggaagttgcagtgagccaagatcatgccactgcactccaggctgggcgacagagtgagactccgtctacaaagaaaacaaagaaacaaaaaatcatacctttagagcaaggccagccttgtgaattagcaaatctgactacaaattcaatcagcagatgtactcagcccagcaaagtgagcaagcttactataggttgtgttaaggcatggactgggataaactggcaaaattagagtaaatttgacaatttgacattggattcattaatgatagcctgtccttcaatgaagtcaggcagcattgtgtttctattcacctctgtgttttgtgaggctataaaaatataagatatgagaaatgtgaatactttttatttgtgagggcagatatcttgaaaaagagagcgagaggaagtcagagtatgcgggtgaagactcttgtttttttgctgaggatttagctttggtttttagccattctcacagagatcattggtcctaattaactggttgttgttgttttttttcatgtgaatgtctgtaaggtttcaggcttgattttaaaaattgggcctatactcacagaaagacaaatactgcatgatctcgtttatatgtggaatctaaaagttttgaatccataaaagcagagagtagaatagtggttaccagaggctagttgggggcaaagttgggggatttagggagatattggtcaaaggatacaaaatttcagttaggaggaataagttcaagagatctagtgtacaacttgatgtctatagctaataacaatgtattgtatacttgaaaattactaagagtagattttaagtgttctcgccacacacacacaaaagaaaatgataagtatgtgaaggaatgcccaatgtaattagctcgatttagctaattatcttccaaaatatgtacataattatcttccaaaatatgtacataattcaagacatcatgttatataccataaatatatacaatttttttatttgtcgaataaaaataatacaaaaaaaccctgggcctatactgcccacaggtagtggccacaggcagagctggtcccaagcccctccctctctctgtagtcccttatcccaggttgctttattcttgtatgacccacgtggcccctctgggcttgtaagggctctggggctgtattttaggactctatagcccttacattacccatttcctctaccaaaggtcatttctcttatcttcaagcttatttttggaagggtcattatttcttcatgagaagtcaaattctgatttgcaagtgctgaacacagatgccattagtctataaaactcttatattctcacatgtaaatgtagtaacctgctaacctcagattctgcttcctctaacctagttgccctgcaactgtgatgaacctcaaaatcaccaagggtacttccccattctcagagatcctgattccttaggtctatgtaggggccttagcactttttattaaataatgcatcactacaggattctgatgtctgtcggggtcttgagaactatttttctgactctagcactaaactcaaaatgtaatttcagatggaatttcctaggctcattcattttattttatttatggcttggccagtcatggatctaatcagtaacttgcaactgttgcttcaactacctctgtcctggactttccagagattggctttaagaaagaaagaggacatccctgggataagattaccatgtgtatttttatgtacacattttgaaaaacatacaaatgaatgggatctttgcttatctcttccatgtagaaaaatttattttacttctatttcaggttttcaataatgtagtaggacaagatgacatcactatatccctgttttttacacagatatattagagatgcattatcttattggaaattttaaactattcaataataaactattagtcttttagaatttctttttcctcaagtgttgataagtaactgaaagtctacaagcagacaagcagaattagtcggtggaacttcatttcttgctccatttttgtcctcagcagtagagggtggtgagatttcaacccagcctagcaggaccaataagtctggaaagaagtagctctagttcatattggcacctgctaattctagttctgaagaccatgggaaatctcttgcctatttagctcagtgatcatccaagatgggaaattcttgggctcagctgtgagggatcccaagtttatatgtaccactaatgtctcacaaatcaagaatccaagagaatcaagagactatagttcattccttatattaaattcttaggactgccaactgggtggctacagttttgggggctagaagtctgatatcaaggtgccaactggactggttccttctgaggaccacgagggcaggatctgttcaggcttgtagatggccttcttttccatgtgtcttcacattatcttcctctgtttgtatgtgtgtccaaatttcctcttctttttttttaatttagaaatttatactgtctacaagctttatatagctttagttaaaaaaaagcaaaaaaaaaaaaaaatcaaaacaaaaacagtgaagccaagacactcttccaaagtctggacccttccggccttccaaatacaagagctctggaagttgtatataccaaatttcctcttcttaaaatgtcaccagtcacattggattaaggcttaccctattaacaccattttaacttaatcacctctgtaaagaccctatctcctgatacagtcacattcggatgctcaggaagttagggtatcagtatcactatatgaatttgggagttgggggaggacacagtttagcccatgacagtcctgaatctcctttgctagatgcatgactgtgggccagtcacttcaccagttgggatactgccatctctatcagaaaaggggtttgggctaggtcatctataaagtcctttctgctctaaattgtaaatataatgagataccaacatttagtttaattgtttaaaattttagaagctaactggatgctttgctggtgtcaacactcccctttacaaaaaaaaattcggccgggcatggtggctcacgcctgtaatcccaacactttgggaggccgaggcaggcggatcacggggtcgagagattgagaccatctggccaacatggtgaaaccccgtctctactaaaaacacaaaaattagctgggcctggtggtgcacatctgtagtcccagctactcgggaagctgaggcaggagagtcacttgaacccgggaggcggagcttgcagtgagccgagatcgcgccactgcacctccagcctggcaacagagcgagactccgtctcaaaaaaaaaaaaaaataaataaaaaaaaaaaaaataaaataaaataaaaatctcactttctgtttctactgttctctcaagtacccctctgccttctgttacttctttgctgcattctgagaggaatggggtggggagcactctttcctgtagaaccccataacccatctattttcatcaatttatttgaaattcaaagccaggggttaaaatgtccactttcaatttgagatgtctaactttcagataaatctattaacatgcatttctaagtgacttttaagctaagcattttattttattgagctcgtatggaagggtaactattatacttgtataataaagtgcactttcaaaaatactcggttcaaatgtaaaataatattcgtaatattttaagacaaacctcctagaacttatatgtgtctttcttcccagagcagtctctatgggtgcctaaacaatactgcattattagatttttttcagtttataagccacacaagaaagttaacccatgtcatctctagaggcataaaaatagacagttgttctgagaaacatatctgtttattcctagttcagtaacagcgcaatgagatcctaaattatgaggtactttttgtttatcttattgtctcattggcaaccagcaactcctgttgcatttttgacatgggaatctatcagggtgtggttaataaagtacatttccatggtaagtattctttaagaaaaaataaaccaagatttcatcagagacagaaattactgcaaactgtacttaccagtttctggtgatttgtataactgagctttcaatttcaaaaattaaaaagttctctttagtgtaacatatttttgtgtctagtaattttacttcaaaaataaaagagaattttctttaccatcaaacaacgttgctgtaatgagtggtgatatatttagtcctagaggaccaaagagaaataaaatggctttgattatgctggtttaagaaaatatatccgattaaacagaggttaatatttgtgatgtttgatttagtaaaattataagactaccaaagaaaactagaagagcaaaataaccaaaatttatataaagaattcaatgttgataattcaaaggtttagaattttttccacctttcaaatactaagttgctgttatagatttactaccattattacccagattttccattttactaaaaaataataacacagttcgttatgataaatcagtatagatctttaggctcaacacaaccctgctaccttttaaacttttttattatacaacaaacacatatgcattatcaagaaaagatgagtttagcaaaatgaagaaaaatagtcttatcaactagaaataagcaccattaaaatttctgtgtgttaaaagataatatactgctgaaactttttttttcttgaaatgtccctcttttctttcacttttcattttcttaatccctaaccttctactgttgaattttctggaccaccgttataccccctcatcaatagggcatttttttctgcagtagctgagcacaatggtcatattgaagaaattcccttgtgggggctttgcctagaggtaaaatcctcttggccgggtgcgttggctcatgcctgtaatcccagcactttgggaagctgaggcgggagcatcttctgaggtcaggagtttgagactagcctggccaacatggtgaaatgccgtctctactaaaaatacaaaaaattagccatcatagtggtgcattcctgtaatcccacctactcgggaggctgaggcaggagaattgcttgaatgccggaggcagaggttgtagtgagccaagatctagattgtgccactgtgctccagcctgggtgacagagcaagactccgtctaaaacaaaacaaaacaaaacaacaacaacaaaaacaaagtaaaaccctcttcactgtgatgactctaaagcttgcttttgtctctctaaatcacaacaaaccgtttgcagtgtgatgctgtgctcaaaattgagaattctcactgactgttccaggcatctgtctactcattcttgccatgctgagggctgtcatttctcaccactgaatgcctttttttttttttgtgcttctttttaaaagtcttttcctgtttgctttgaacttcaataaaaacagggggtaagaaggtaatatgcttttattttgtctgtggggtttttttcttccttcttttggttccttttcagatcctagctcatcaaggccatttgccacactgacactggaataagcctgaatgggggtctatatttcttccagtagttagtttaattcggtcattgagctgttgctctatttgtaaccgtcatgctagatccgagggctgactattcctgagaaagtgtggagatcctttcagactgccatggtgctagggcagagtttcagtcattatcttctgtgtctgctaattcttgcatcatttcttctactctgtaacctggttggctatgaaaagtgattcttcctcactgatgctgcaggcaatgggtgaatatccaattgttctctcaggttcttgtcatcggatacaaagaacaaatttcatgtgtccctgtttctgagaggttcaaagggagcaaatgcacagattctagcttaggatgacttccagcttctaactatttgtctgtgcattccatttcctcacccctgcgagaggttgcagtcatggtaacggctgttctgagaaattcagtgcccaaactggagggaggggaacacaaactcagcttcttcccaagcttcagggcagggctggcaagttttgccttccccgccagcaagagccctggctttaggggtcttgctacagttttcccagactggaggtcttggggctggattctggttcttagcgaattcttgccaaacacctcccctttccccagtatccatttgttttgaaggttctttgcaggcttcttgccaataattgtcttaaaacaaatggagttgtttgcatacctagatggagtaaaatatttaggaaactattctacaaatatgaaacagcccagatttgggccagaagtcctggtcctgagtctcttgttagccactcttaactgtgaattattggacaaatcatttctcgcactctgtgtaatctgtcacctgggtacttgatgatttaaaccaggaattgtggcccttctcataatactgtctcctaaatattgggtgaatttagtatatcaaggagggcagggcactatacccgtaggggactctctctctccctctgtctctttgcctttctcagatatgcatctttggtggcagacctggggttcaaaccacagttgttttgaaatttctctttccttctccactatgctccccctcactgaaactttaataataaaagtagcacacttattgggcatgtatttgttatgttccaggttctgtgctaacagctttaagtgcattattccacgtattttcacaacaagcctgtgaggaagaggttatttccacttatagataaagaaactgagacttggagaatgtaagtgattttacccacaaacacagggcagtaagtgggaggccctgttcaccttagaacacctggcttctatcattcatggtgctgtttctagtgtggtttgaagaacctgagatccaaactgctatacaagtgacctgctgctttcttggagagagaaatctgaaagacagtggagccctcacattgtctttgcctgtgcacagcagatactgccaattttgggtgggttacacttgtttaccacgttgcttacttcagaaatcaataaaattctcttcatgcttttattttacaggttcttacgtctgttgctagattatcgtccaaaagtgttaatgcccaagtgactgacatcaactccaagggattggaattgaggaagactgttactacagttgagactcagaacttggaaggcctgcatcatgatggccaattctgccataagccctgtcctccaggtatgttacacaaaacatccagagattacagtgaaagtcacagttaggagtagcacatagtaatcatgactataataattttacagtttttggttcccctatattatataacataactgagagaaaaacaactatgaaattattttccaaagatgagttttatttatatttatcacgcttatttgatgtggttatggataaatttaatttacaagtgacatgcacctctgaaatgagaagactggtctatttggctccatttttttctaagcaaaaatgactcatttgtgaatatgaaagcttatcatgtcaaaactgattaggatctaccataacaatagtggaactctgaaagcaagagacttctcctcttaagggatatgtctcagcacttcccttcaatcagaaggtctctaagaaagctgtcctggcactgaagcctgcaaaatatatttgcattttgcagctgaataactagacgaataagaaaagcaacaggcagaaaccaacagcttttttttttaaatcaatactttgaagggcaaactaatttcagatcacaaatccttcaaacactggtaaattagaagctaagcaaaatgcaattgtgcaaacatttcttcaactttgagtagagttgaaaaaaggaaaatagcacatgggttcatgtgatagattaatagaacaaaaaaggactgtagtatgtttcatggttgtcctcccaggcttccagcactcaagctgtaaaacaggatgggtcctgtttgtgaaaagattctaccagtctccctgtgcttcatgtccagattttaataaccgttatggaaaaatctcccctataacccaacccatttatacttaaacccatttacacttaaatcttctccaacacgaataaagaatggcgtcctggctttattataacctgctaaacacaatcaatttgctctatgaattgaaatctttgttcataattttaaaacctaaaatgtaaattaaaatgaacaaaatatgctttgcacatcaaactgtcaaggatttttgtctattgctttttcggttttgctttgttttattttaatttaagaagtgaatgtaaattgttacaaacttttaagaaatacatttggatatatgagtcaaaaatttgaaaaaaaattttttttaacttttttttcttattattatactttaagttttagggtacacatgcacaatctgcaggttagttacatatgtatacatgtgccatgctggtgcactgcacccactaactcgtcatctagcattaggtatatctcccaatgctatccctcccccctccccccaacccactgtttatacttgctaagatagcaattaatttatacgaaaataccctgagaaaataatcaaaaataaaggaaaatattgtacacatgatatttcattatcaatatgatgtaggattccttaggtaaattctggaatatttaaagactgaaatagtatgtatcaaagtcatgttttctgatatatttctaatataatcctcaattatataaaccttcttaagtaatttccaactgatctggctggattaactgattctccctgatccgtctataaaatatcctggatggcatccaaccatgttaaatactcttcccacttcaattccctcttgttgaattttaggcttatcaatatctaagttgcttccaaatctgtttatgctcattagtgttgtgatattcatatgtaatttgattgaatattgcataaattaatgaaatacaaatacagagaaaagacagattttatttctaagaaaactaggttgagtgctttggagaattcaataaagatgagctgctaaaatgttgttgatgaattttgtgagggaaaaataaaagttaagtagtaggaaaaatcacaaaaatctctaaagccattcatacagattattggtatgtttatgttttcctttcatcaaaaacgaagggagggagggagggagggagggaggagaaaaaaagaaagaaatgaaaaaggaagagaaaaatagacaaacaggaaattataggtgatgcattatggatgtgacttaagaaagaacctgggattataataacttctatatcacaaaattgtcaaatgattatatagttatattttataaattaaaacaaaatatttacagtatttttaagtgatttcctatgtaaattgacatttttgattaaatgatcaaagaagtcctccccacatcatcatattcaataagaaggattctatggtatactgcacacatatttcatatatacacattgtacatatatatatatacacacctgttatatatatgctcatgcatatacatgtatgtatgtattatatgcataggaatgcaacaaaataacggcaatatctccagattgttgatatatagttttttgtttgtttgtttgtctgtttttttgagatggagtctcactctgtagtccaggctgaagtgcagtggcatgatctcagctcactgcaacctctgccttctgggttcaagcaattctgcagcctcagcctcccaagtagctgggactacaggagcacaccacaacaccgggataattttttgtgtttttaatagaggcggggtttcaccatgttggtcagtctggtctcaaactcctgacctcaggtgatctgcctgccttggcctcccaatctgctgggattacagacatgacccactgtgcccggcctgatacataagttcttattatactttcctgccttttccaacatttctataataagcatatgtaccattatactaaaaaaagtattttaaaatctgattttcaataaaacaactacttattttcttattttaataaattttgttttcatactttggaggaacgaaagaacctgtggtttactgtatctccattataccaaggaagttgtgctaggcacattctgtaagataattcattaaagagaccaattcattcagagaccagtataataccactagcaaaaaataaaattatacttggacttgggttctgttttctttaaatattgctacaatgttatatagccctatgcactatttttgaattttgttctgggaatctccagtttgttttttactattgacagactattatctttacttactaaaatagcatatatatttacatgtcataatttgctcatgtagtaaatattttgttttatcaaaaagaatatatgaagttattaaggaattcatgttcctaggaaacacagcagaaattaattttgctgtataggtgagcagagcagattaaactgcttatatttttaaaactagttataccattaacaattagagtcactagtaatgtttttctcacacttcccttgatattttctgtcactttcttcttaattctctattcccttaccttcatctagctttccccatagcatttttttagcacttgatatcaatatatttatttgtgtattgtctgcctgcatcccaagaaggtgaagtctttggtgatgaagggtttatcttatttcctgcataatatcaaacttctaaaaagttcctaggactcaataggcatttaataaacacctatcagataaatgaattttttaagagaacacattacataatgctttctaatagcaatacagtgacaaactttatttttaaagtaaattaatgcaaatatgtatattatttaaaattgtttgtttttaagataacaagcctgatagataataaattttggcataaatatgttaatgcttatcaaaactcatcagtacatatcctgtcttttgatgaaaaagtaatagaaaggggagaacaaagagaactctcatgctcactaggcaggccgagtgcagctctgacagcaatgcaagagaaatattactatctccatcatatgcaggatgaaatttaggcttggagaaaacaacactttgttaaagattttatagctgctcaagatttgaccaaggcttttaaaacttcaaatgttcttttccttattacactgtttcttatcaggatttgtggactttggaaagtaaaatgaaaagtcagagcaatgtgagttagtttgataatctcagtggccagtaacagctatccccactctgaatatataccaaccaacctctcccctttctccaaggaagttagttcttggcaaaggcatttcatgcagtgtactttgtcattctaaccttcctttttttttgtatgctcctgttgctaatcatcctatttctatgggcttcagtcactcttttagcttttgtcttgggagactttctgtctgttgacatgacttttaaaataatcttctcccccattgtatttatatctcattagcctaccccccctccccttgtgttttagaagagttttattgtctgtcatccctctatacttcccaccctgttacctgcccgtgtcctgttcaaacacttgctccttttttccttgggcaggtgaaaggaaagctagggactgcacagtcaatggggatgaaccagactgcgtgccctgccaagaagggaaggagtacacagacaaagcccatttttcttccaaatgcagaagatgtagattgtgtgatgaaggacatggtaagagtcttaaaatgcaattgaaagaggccaatcttggaatttcatgtagaaccatttataagacaatttgaaattggggcctactgtggtgctatgttgacacacaggaaagggaaggacaggtggctagggtaccgcagaaccaggtgccgagctaactactggtctagacctttatgagtaagtctaggcaattcttccagatataggagaatgagtaaatatgaaccctaggaacagggttcatcagctcaaatcaaaagctcagaaattattttttttctggccttgacttacgcttatataatggtgctcgttcatggccagaaaaattcagaagcctgcagatacaaggacacagaaatccaaaaggtaggtaggaatgctccccctttctttggggatttagtttgtcctgataattccatctggggacctgaattttcatggatatctcaatgtattctaaggacccagattgaagtataacagaagtgtttctagttttgtttgacatgaagaaacctctggacataaagcttttcccatccctattcagcctataaagcaatgtttctcatccctggcagtgcattagaattgcttagggagctactaaaaatgtttcatgtttaggtcccatctcagggcaattacatcagagtctctgagtgaggaccttggtattggcctgatggagtaagtctggggtagagcctaacattctacatttttaacaagctcccaggtgatgctcatgctgccagtccccaggtcaccctttgagtgttaaggctagagactagaggaacaggggagacgtctaagtattggtgaggtttgtcttggttgctgctaaatgattgctggccatttcaacctggggtttcctgttctgtgtttaaacactgactgtattactggtgtcatgctgtgactgttgatataagcagtggatctcaaaaatccatgcagctcctgcccaccattttcatagtctgcttataattagccgctataactaatagtttccaaactgattttctaggcttagaagtggaaataaactgcacccggacccagaataccaagtgcagatgtaaaccaaactttttttgtaactctactgtatgtgaacactgtgacccttgcaccaagtaagttttagtctttctctgattaaaacactagatataacatgagagttatcattttcctagggaagtaacactgactgagagttaagaattagggttctagtcctgctttgcctccaagcaactagatgactgtttgctcatttaaacactggtgaacttcctgtgtaggtgacactttgctggccacttaagctaaagatatgagccagacatatgcctggcatcaaggtatcagtccagaagcacagacagtcaaggaaagcaatggttattgtgtttcaacagcatgagaatagcatcagaagagacttatgttccaggtgttacaaattatacagaaaaacttttcaactctgcctgaggagatggaggtgaagacatgaatgtgtctcatgacttgaatcttgaagaaagaaaagaaagagcattaacaggtgcacatggatggaatgcacattataggcagggaaacagcagctgcaaagagacaaaggaagctcaggaaaacagaatacctggctggagtgtaggaaagactgagaagcgttcagggctgaatcatgaagggccttgtcttttaggctaaagaggttggttttgacccaaagttagagaacctgccttgtaagtcatcttgggaagcttttaggagttcatctaataggcttaagaaataagcacatgatgccttatgttttatttgctaggaaaattttatgtacagttgtcccaggctctcccctggccacaagtgtctgagagtgcccctatgatgacaggctaggtaggcattggggaagcagctgacttagtaaaataataacaataatagtaattccaaatatttcataatcttgatttaattttcttgtcatcataaccttttgaaatagataatattatttccatgttattgatgagataaaaggctcatggcagtgtgacttcccaagctcacctagtcaggtaatgggcagaggctgtgaactcagacaacctgattgtgaatgtttgtctgtctgaaggaaatcacacatgaacctcttgagtctcctgatcaccaccggttgctaaaagtggcagcctctaagggccagctgagtaccctccctgagctacatcatgggcttggctatcacctggccattttcttggtctataggaattttttgaaattacttttgacagtttattttaagagctagtttaagctataggatttacgtgttcagtttattactaggtttaagtttatttttgtatccacttcatctctcttgtgtgtcactattttcctatcttcctttaactcttgaaatcttaagacagtcattccttatgatatttttcatccagccatccaaattatattaacttgtgccagctttagatactaatttagaaatatttgaaggaatacgtttgccagagatgcaaagatgaataaaatggcccctaatttacaaagtgccattgaaaattataaaggaattattctgccaggcttttgaatttctcctgtatttttttttctagatgtgaacatggaatcatcaaggaatgcacactcaccagcaacaccaagtgcaaagaggaaggtaattatttttttacggttatattctcctttcccccaaccccatggaaagatgtgaagaaaaaccaatcactcttgattagtagaaagtcctttatttaatcttaaagattgcttattttcatataaaatgtccaatgttccaacctacaggatccagatctaacttggggtggctttgtcttcttcttttgccaattccactaattgtttggggtaagttcttgctttgttcaaactgcagattgaaataacttgggaagtagttcacaaagatttgcctcattcttacctataaaaagctaccactttggtagatttatgtattgttaatttcttgcccctgaatgcagccttgagagctgactgataagaacaaatgaaattattcctcagctagtttctgagcaacagttttggggcattgagtggtattctcatccttcctatgaacaggtgttctctgcagcagcagaattggccaaaaatcagaagtaattcttcactattcattgagatctccctatgcaaaaagagaacacaagaagcaaaggcattcccaggaaacacattgcagggaacactttaaaaacttgtacttcactgcctcctcttcctcggcctaattgcttgtttttaattatttctccttcttaacttaaaatactatggggacacatgttatacaaaggtgacttagtagagtcagtagaaaagccaaaattagatattatcataattagtctagaaaaatccctttaagtcattcatcaactacagggtcacaccaactttcagtaacttagaagtattcaattttcccttctcagaacaattatctgtttcttcagttcagttgaagaagaaagtttgccttgcctttagcggttgtttagctgaaaatacatttgggatatttaagcactgtaattgtgctcagagacatacagattcttctatctcacattgactttaatgcatacacctattgagtatgtatgcttgagttatttgtgtgtgtatttcatttctgggcatccatagcaagttgatgttgacttgcttgtcctacggcttctgcatcctgccatagtcttgccgtccacatctttgctggacagagagtggtgcttgccatatggtaagtcaaaagccatctccttgctaggccagcctgtggtaattagatgactaattaagatatgtcctttcactagaacacttgacttagtagtacgaaagttccaaaatcagcggtctcctgcgatgtttggccacttttaagtttcactgaatttctcctttttccttcttatatttctcttagtgtgaaagtatgttctcacatgcattctacaaggctgagacctgagttgataaaatttctttgttctttcagtgaagagaaaggaagtacagaaaacatgcagaaagcacagaaaggaaaaccaaggttctcatgaatctccaaccttaaatcctgtaggtattgaaataggtatcagctttccttgaaaagaaaaatagagaaattagtgatttggctttttgttacttccttttacttttttgtttcttgtttgtttcattttgtttgagatggagtcttgctccatagcccaggctggagtgcaggggtgcaatcatggctcactgcagcctcaaagtcctgggctcaagtgatcctcctgcctcaactgtgaccctgggactacaggcatgcaccaccatgccaggttaattttttatttttattttttatagagacagggttcactttgttgcccaggctggtctcaaacttttgacctcaagcaatccttctgcctcagcctcccaaagttctgggattataggtgtgagccatcacatccggcctgttactttctttatttaaacattgcttgtgtttgtgggtgcataggttaaaggggcctcacagatgaattatgatatggtacccaaattaaaagtaaacttgtacacaaaaaccgtaagaatcaacaaaggagggaattgagagtgtgctgaaaatgagctgaaaaaagaacttggccaacctccatgttccgtgttgttgttatccctgcagagaaacagcctttaccaggcatgggttcagtatccaagcctgagcaaagagattgctcttaaagtttgtcataagggcacagcttaactttctctggctgccggttgaccttatgtctcaccatatcttttcccaacatggtatcaatatatttcagatagcaagaaatacaccgagaaaagaaaccagttgcacttaatggaattattttcttatttggggccagggctcagtgggagttaggattctttaaattaatatggtaaaaaaaatttcaatttgagccattttctggtattaagaataagaatagttacagggaagaaaattttagagtagttatatttattatttattttaataagtctatatgaaaaataacctcaacctattttatgaattctttaggtttcttgcctttaaaaactaagacaatattgcttagtttctggcaaggccggaacctttcagaataaaaattgaatggtaaaagtaaccttcttaatcacttaatctagcttcctaattttatacatcaagcaactgattgtacttctttctgaattaaggaaaaattagaagttcacatttagaatattctaaagatatatttttatttgtctttctctgcttccattttttgctttctaggaaacagtggcaataaatttatctggtaaggcttttatcattttatttcatagagatggcatcctttagagtaataggccaatttcagagtaaaataatgttactaatttcagtgacatattatgggatcttgttatttctcatacaattctacctgctcagcataaagcatttatcaggcagtttgtttaaatttataatgagtactcatagttaaaaataatcaagtaacaataagacacaatagtctgaggcttaagaaacttttccttcataatcagctagatgtattacagaactcctgcctaaaaagatctagaggttaaagtgtactgtagactcaggtattatcagtgtacccaactctataacaacatacatgattccattcagttgttctttgatctgtgatttagagataagatgatcataaactctttgcttatacttttagatttgtgggtcattgatcattggatccataagagatgttataggtgatcttttccaatcctcttaatttataaatgagaaaagaagatacagaaatgttatgtattgtggcccaggttatttaacaaattactgggtatatggcaggatttggagttagaactcaaggttgtcttgtttctgtattcccctagtcagctcttcatagacctttaggacttagctatattctgaagtactataaaaagagaaataaacatggttttcactaatgggaatttcatttagaaaaacaaattttcagactattttctatttttcagatgttgacttgagtaaatatatcaccactattgctggagtcatgacactaagtcaagttaaaggctttgttcgaaagaatggtgtcaatgaagccaaaatagatgagatcaagaatgacaatgtccaagacacagcagaacagaaagttcaactgcttcgtaattggcatcaacttcatggaaagaaagaagcgtatgacacattgattaaagatctcaaaaaagccaatctttgtactcttgcagagaaaattcagactatcatcctcaaggacattactagtgactcagaaaattcaaacttcagaaatgaaatccaaagcttggtctagagtgaaaaacaacaaattcagttctgagtatatgcaattagtgtttgaaaagattcttaatagctggctgtaaatactgcttggttttttactgggtacattttatcatttattagcgctgaagagccaacatatttgtagatttttaatatctcatgattctgcctccaaggatgtttaaaatctagttgggaaaacaaacttcatcaagagtaaatgcagtggcatgctaagtacccaaataggagtgtatgcagaggatgaaagattaagattatgctctggcatctaacatatgattctgtagtatgaatgtaatcagtgtatgttagtacaaatgtctatccacaggctaaccccactctatgaatcaatagaagaagctatgaccttttgctgaaatatcagttactgaacaggcaggccactttgcctctaaattacctctgataattctagagattttaccatatttctaaactttgtttataactctgagaagatcatatttatgtaaagtatatgtatttgagtgcagaatttaaataaggctctacctcaaagacctttgcacagtttattggtgtcatattatacaatatttcaattgtgaattcacatagaaaacattaaattataatgtttgactattatatatgtgtatgcattttactggctcaaaactacctacttctttctcaggcatcaaaagcattttgagcaggagagtattactagagctttgccacctctccatttttgccttggtgctcatcttaatggcctaatgcacccccaaacatggaaatatcaccaaaaaatacttaatagtccaccaaaaggcaagactgcccttagaaattctagcctggtttggagatactaactgctctcagagaaagtagctttgtgacatgtcatgaacccatgtttgcaatcaaagatgataaaatagattcttatttttcccccacccccgaaaatgttcaataatgtcccatgtaaaacctgctacaaatggcagcttatacatagcaatggtaaaatcatcatctggatttaggaattgctcttgtcatacccccaagtttctaagatttaagattctccttactactatcctacgtttaaatatctttgaaagtttgtattaaatgtgaattttaagaaataatatttatatttctgtaaatgtaaactgtgaagatagttataaactgaagcagatacctggaaccacctaaagaacttccatttatggaggatttttttgccccttgtgtttggaattataaaatataggtaaaagtacgtaattaaataatgtttttggtatttctggttttctcttttttggtaggggcttgctttttggttttgtcttccttttctctaactgatgctaaatataacttgtctttgatgcttcttggatcccttagaaggtacttcctttttaaccttaacccttttagtagttaaataattatttccataggttgctattgccaagaagacctcttccaaacagcacatgattattcgtcaaacagtttcgtattccagatactggaatgtggataagaaagtatacatttcaaggggtaggttttattattaagaaagccaaatgaggattttgaaatattctttcctgcatattatccattctagctacatgctggccagtgggccacctttcttttctgcaatttaatgctagtaatatattctatttaacccatgagtcccaaagtattagcatttcaacatgtaagcatgtcggtaagatagttgtgctttgcttagggttccctcctgtgttatggtctggaaagtgtctttaggcagaaagtctgagtgatcacagggttcgctcattaatttctcttttctgagccatcatagtctgtgctgtctgctctccagttttctatttctagacagaagtagggcaagttaggtactagttattcttcatggccagaagtgcaagttctactttgcaagacaagattaagttagagaacaccctattccactttggtgaactcagagcaagaactttgagttcctttgggaggaagacagtggagaagtctttgtacttggtgatgtggtttttttcctcatggcttcacctagtggccccaagcatgacttctcccatgtcaatgagcacagccacgttcccgagttgaggtgaccccacggtccagaatcatcctcattctggtgaacctggttctctttgtggtgggcatactgggtaggagaatcacccaaaggtcacccatgagctgcagaaaaaaaggctatttgcagaaggagctcacagatcacattgaaagcattgcatattcaaacatcttggtcttctttattggcatgcccacagggtcttctgacctctgattagatcagacactttttagatattgaatcatcagtttctgtacaactatctgaataaggtatataatcaatgaaatttagaatttttttctatgcttactcctgattggtaatttgtttgggtttagaattctatacaaggccatttgtaattttcctcagcactttaaaaatattaaaccatgttttcttaacatctgttgctgttgattatgtctgctcttggtgtaaatatcattcctttgtaggtaatctgtaattttttttcctctggtaatttttaaagcttcccctactactttcctatgtgttctgcagtttcacaacaatgactttcaatgtgtatttatttttacttaatctatttaataagatttaattagaaaggcagggctttcatcatttctggaaaaaatcccagctattttctctttaaatagtgtttctttaccattctcattctcttcttctgaaactgttgttattatctgttgaagcttcttgagttattttctaggtctcttaattttttttaaaacaataattgtctccgtatgttgcattttaggaaatttctcattactctttttaaattaactgttagtttttactaagcccggctagaatagtctatccactgaggtatgtattttgttttctatatttttcattcttaatgtttcttattgttccttttacatttttacttgtatatgtttcattcctgctttttttaattttctttcttctttctcttttctctctttttttttttcttcttgcagtgcagacagactttattagtacagcagaggtgcccacagagcaggcagaagggatcagtgcctggatctgtcccttcctccttctgccctcgctgagccctagtgtgtccggaattggtgggttcttggtctcactgacttcaagaatgaagccgcggaccctcacggtgagtgttacagttcttaaaggcagcgtgtccggagttcattccttctgatgttcggatgtgttcggagtttcttccttctggtgggtttgtggtctcgctggctcaggagtgaagctacagaccttcgcggtgagcattacagctcttaaggcggcccgtctggagttgttcgttcctcccggtgggttcatggtctcgctggcttcaggagttaagctgcaaactttcgcagtgagtgttacagctcatgaaggcagtgtagacctaaagagtgagcagcagcaaaatttattgaaaagagtgaaagaacaaaacttccaccctatggaaggggacccgggccagttgccactgctggctctggcagcctgcttttattttgttatctggccccacccacatcctgctgattggtccattttacagagagccgattggtccattttacagagagctgattggtgcgttttgacagggtgctgactggtgcgtttacaatccctgagctagacacaaaagttctcaacgtccccactagatcagctagatacagagtatcaacacaaaggttctccaagtcaccaccagagtagctagatacagagtgtcgattggtgcattcacaaaccctgagctagacacagggtgatgattggtgtgtttacaaaccttgagctagatacagagtgccgattggtgtatttacaatcccttagctagacataaaggttccctaagtccctaccagactcagaagcccagctggcttcaccccgtggatcctgcaccggggctgcaggtggagctgcctgccagtcccgcgccatgctcccgcactcctcagcccttggatggtcaatgcgactgggagccttagagcagggggcggtgatcgttggggaggcttgggcatggtgggctgcaggtcccgagccctgccccatggggaggcagctaaggcctggtgagaagtcaagcacagcagctgctggcccaggtgctaagcccctcactgccccagggccggcggggctggctggccgctcccagtgcagggcctgctgagcccacgcccacccggaactcatgctggcccacaagcaccatgtgcagccccggttcccgcccatgcctctccctccacacctccctgcaagctgagggagccggctccgaccttcgccagcccagaaaggggctcccacagtgcagcagcgggctgaagggctcctcaagcacagccagagtgggtgccaaggctgaggaggtgctgagagcgagcaagggctgtgagggctgccagcacactgtcacctctcactaggaggctggggcctggcctggaccagtttctcttgttccacctgaaacacatgagaatggagagcttagggctggccttgcttctggctcctattgtcataactctaatgttatcacttcattgaaaagattagacctctccttccccagtccctaggcagggaaccccagccactggggagagacaactttgtggggcctgggcttaggtatatcctctagacacttccgaccccaccccacaccctttagttctctgaggctcaacgcactttctttatttcattgacaatttatcatagtttaatataacttattccattatttaccttcttgaagatcctactgagttattttagagtcttttttagagttgctctattattttaattttaactgcagtgatttcatgctgactttgtaggctggctttcctcatgtgattttccttatgaatttttgaaatttgtaggcttatcttgaatagcccatttttttctctctgcactcatctctccatatttaatagttctgtgtgttcttttgccagttcttccagagtccccagttctgagccaagatttactgagataatcttgaggctcatacatcatggtgatatcaggactatcacagattcagtcatgcatttgggggcagcttggctcagccactggtcataggctgtgccgaatcttctcagacccttaggcctgtagcttcctagaagccacagtcccagggagtgtttggcagtaggtctgtcttagtagctctgtcttagctgtcttccacaagacagaaagttcagagagagaagaaggaaaagaaactggttaggcagacagttaggaggggtccttggtaaaactccttcaaacagagaaatagcctgaaaaaatcaaagctacaggcacagatagagcagcctggggaaaaatttagctttagctgcagagataagggagcaaggcctaacaaagaagcctttgttctttggataatcagcgggctcccaggaaaaagtttcctccccttttcagacatgtacatgatgggctccatgggaacttgcacagggagaggggcttacctaaaacatacccacagtttcataaacaagagaagctgtactttgtgcttacctaagacatacctgcagctgcacaggtaaggagagttacacagacagctactacacagttaagggaagttacacaaacagctacagagatgaaaggagttttttcttataaaagcttttggattcaactgtaaaagtggcaaccctctttcagcctcctctttgctgcagagagctttcttctttcaattattaaacttttactccaacctcacccttgtgtccaggctccttaattttcttggtcatgagacaaagaactccaggtactacctcagacaacaagactgaaacattgtggtgcactggcaagactgcaacagttctacatcagcccgtggttttaagaagggagcctggttcctgttctgcctcaggtggggcacatttattccgtaccaaacctaaaagcaggctttgctttgcttccaagcattgatccaactaagctttggcttgttgtgcacaagtcatcatcttgtagttgtttccattcttataccatgaaaggattgatcttatttttgagcttggctatgcctttttattttcctttagagacattctatgtatcattgctatttgctcagattggtaggaggtggccctcaagaaatgaacttacaatttggtattaaccccagggcccattagataactagaaacaatgttttgttttgttttacattttttagttaaaactaaggatcaagttgtttttcagttatatagggccctttgacaggacttgatatggtttggatctgtgtccccacccaaatcccatgtcgaattgtaatccctaatgttggaggtagggcctgattggaggtgattggatcatgggggcggagttctcattaatggtttagcaccaatcccttggtgctgttcttgtgatagtgagtgagtaattgtgagatctggttgttttagaagtgtgtagcaaaggccgggcacagtgactcacacctgtaatgccagcactttaggaggctagggcgggcagatcacctgagatcaggagcttgagaccagcctggccaacatggtgaaaccccgtctctactaaagatacaaaaaattagctgggcgtggtggcacacgcctgtagtcccagctactatggaggctgaagcagggagaatcacttgaacccaggaggtggaggttgcattgagctgagatcgtgccattgcactccagcctgggcaacagagcgagactccatcccaaaaagaaaaagagaagtgtgtaccacctcccctgacccttgctccttccctggtcatgtaagacatgcatgctttcccttcacctcccaccatgtttgtaagtttcctgaggccttcccagaagcagaagaagctacatttcctgtacagcttccagaaccatgagccaattaaacatcttttatttataaattacccagtctcggctgggtgcggtgactcatgcctgtaattccagcactttgggaggccaacgcaggcagatcacaaggtcaggtgtatgagaccagcctggccaacatagtgaaaccccatctctactaaaaatacaaaaaattagccgggtgtggtggcgggcacctgtaatcacagctattcgagaggctgaggcaggagaactgcttgaacccaggaggcagaggttaaagtgatccaagattgtgccattacactccagcctgggcgacagagcgagactccatctcaaaaaacaaacaaacaaaaaattacccagtctcagttatttataccaatgcaagaacagacaaatacaggactcaggagaaaagaaaagagactgtagggtttcccacataggtctgcatcttatgatagtggtgaattgagagtcatacagatctgggatcaaatatttattttcctcataaaggtagaaacaaatggcttaatctcttcgagtcttaatttccttattttttgtgaagattaaagtgtatatgaagtatctaccagtgtttagctctgtaccttgatagatggtaacaacaacaataaaaaacctcagatgcttaagcaaaatggaaatttattgacatatgttactagatgctcagatatggggtgggtttgactaacctaaaccagtgcctccagtcaagattccttgttattttcttgaatctaccctcttcatttatctacttcttgtccatctcttcatatatttgcttgccaaactggtagtgacaaggtgcctgcaaccattctcgacctatctaaatatcacagtccagaagaaatgacacttatgccccccgtcctccaagcacctcccctgacccttgctcctgctgctccttgctgctgagagccattcttattcaactgtttagatcataagcgacctctgaattaatgacttatgattggagaattggatatgtcgattggcttaatccacaggccccattcttggagcctggcataggatcagcttcccctgagtgtcaaaagattgggagtggggaggcaggaggacttctgttaagaggatgatagagggttctgggtaggagtgtcaggatgtgtttaggtactcaagctgacttaaactgtagaaaaaaatgtattacctcatatgacaggcagtccaaaggtgtggctcactgaagcctacttgtaccagctcacaagagctaattactaaattcttaggaattttgaaagccagttgttaaatcgttgatagcttgatattgtcatactgggagtatttacactatagaaattgtcaaaggctacagatcaggaatctcccccgacccccacaaagacagttactggctactgggcagaagtcagtgttggtggctgattcagtgtctcaatgatactatcagggtcacaggattcttttctagttttccaatctgtagcttcaacattggcattcaattagagttatttgtttttgcatggtcatccaatggctttatcagtgaatcaacagcatgattctttatccgtattcaatagcaaagaaaaagagagaaaaacatgaaaaaattctcccctcagatatggatcatatacctggccttttagtatgattgagccaaatttagtcgtctgcctacctgtgtggtctgccatatactgattgactcaggcaactcaggagccacctctggagctgtggacaggatcagtttctcctaagctttatgagttatgggaaaaagtagatcagaatggaaatactactagaaaaacaaaagggtgaaatggatgctgaatagtttcctctgtagaaaagaacaaacaatatcaactacacatattctccatgtccctcacaagttgagtaggcacttatagagaaaatctagatcctagggcaaaaggaagttcattgttattggccttactgtttcagaacccccaaaacagacacatggacttttttatgaagtaaagagatcttcaagaatctttacaccttttaaatgacctcaactgagtctaggtcaagtcatggctgctggagaatgtttttgattggatttctttgaaagaagccttgaggcaaggtttgggtacaggtggttcatttaagacgtgattccaggaaacatggtgatgatgttgtaaagtaagacagggaataaggaaaagcccatagtgcaggccctgataactatgctattgctatagacaagtggggcccaattctactggggtccctctgaaaggctatgtaggacaaacctccacattgtaccaacaaggcacagggaagctgagtcttgacaccaactccagtctttcattggttgaggggtctttctagggcattaactccctaatatccctaatacttctggcctgtcttcttccctccagctttggtatcctgaggacagacacctttaagcagagagatggaggaggccatgtgtcacatttgttagcaggtgatctcttgatgatccagggtccaatagtgtctatggcaaacagcaggctgctgagatgtctaagtatagaaggactagggtatctcatgggataactcgttctgcatgaaaaaggtaatgggcatggtgaattttgtttattaagaacaccttagttggtgacattaattttcagtatagattggcgtctattgcttaaatctcttgcccatggatgaaagcaaagaaaaatcaataaagaaagttgaaagagctattttacaaagcttggaaaaacactggtctctcatccctgtgtcaaaatatagtgcagatttatccagacatccaatcttcctttcctttcctcgcttctcccctctcctccttaacacgtgcatattgtccaaaccaccatcttgctttggtataaggggaattctactcttgtgggtgtccaaaggccactcctgtggaattcttacccttatgccatctaaaccatgcacctctgatatgcactcacatataattgtcttctgtagatgtttaattatctcccctttgctaggccataagccatctgagggcagaaatcatgattagcacagagtaggtgttcagtcaacatttcttgaatgaatcagttaatgaaggaacattatgtatgcagtagtcatttgtgttctgtatgactggcatttgatggaaaagtcacagcgagtgttagggaagctgaacttttttttttttttaaacattgtatcattaatttatcatgtgtatccaagctcctttgagtttccctgcccccatccctgtgtcattccagccatatccagctactccttccatgcttcccccattcttgtttctgactctattactcccagtccaaatcttgctcttcactgtctgcaccttgtgctctcctctctctcaaaaaaatctacccaaattccacccctcttcacaggcccagggaaatcactagttcccgcaggaggctgtaggctgtaaccaactctctgaaagctttgagtcctctctgaggtcatctgtgcttgtcctcgttccatcaggcactcctatgttacttgacctgtggtctgcatgtacagatcttgtaccccatatacattgtaaggtccttgaaggcagaaaaggaagcataaagaagtgggtaggagtgtaagctctgaagactgtgcatttgaatccctgccattcctagatttgggaccttgtcaccttgggcaacttatttacctcctctgggccttagttttctcacttctagaagagggaaaatgatagtatctgccatgtagtgctgctctgaggattaaatgagatactccacttagagcccatggaatggtatctggcatgtgataagcactaaatatagctttcctataattacagtaatgcccagggctccacaggcccagcccagcaccagtacaggaatagtatgacattgatgctagagttggcagattgaggagaacacacaaagggctaatgatgttcaaatacacatcagatttcacacagagcttt

SEQ ID NO: 115 - DNA, 2032 bp, Homo sapiens
gtgagctcgtctctgatctcgcgcaagagtgacacacaggtgttcaaagacgcttctggggagtgagggaagcggtttacgagtgacttggctggagcctcaggggcgggcactggcacggaacacaccctgaggccagccctggctgcccaggcggagctgcctcttctcccgcgggttggtggacccgctcagtacggagttggggaagctctttcacttcggaggattgctcaacaaccatgctgggcatctggaccctcctacctctggttcttacgtctgttgctagattatcgtccaaaagtgttaatgcccaagtgactgacatcaactccaagggattggaattgaggaagactgttactacagttgagactcagaacttggaaggcctgcatcatgatggccaattctgccataagccctgtcctccaggtgaaaggaaagctagggactgcacagtcaatggggatgaaccagactgcgtgccctgccaagaagggaaggagtacacagacaaagcccatttttcttccaaatgcagaagatgtagattgtgtgatgaaggacatggcttagaagtggaaataaactgcacccggacccagaataccaagtgcagatgtaaaccaaactttttttgtaactctactgtatgtgaacactgtgacccttgcaccaaatgtgaacatggaatcatcaaggaatgcacactcaccagcaacaccaagtgcaaagaggaagtgaagagaaaggaagtacagaaaacatgcagaaagcacagaaaggaaaaccaaggttctcatgaatctccaaccttaaatcctgtagtggcaataaatttatctgatgttgacttgagtaaatatatcaccactattgctggagtcatgacactaagtcaagttaaaggctttgttcgaaagaatggtgtcaatgaagccaaaatagatgagatcaagaatgacaatgtccaagacacagcagaacagaaagttcaactgcttcgtaattggcatcaacttcatggaaagaaagaagcgtatgacacattgattaaagatctcaaaaaagccaatctttgtactcttgcagagaaaattcagactatcatcctcaaggacattactagtgactcagaaaattcaaacttcagaaatgaaatccaaagcttggtctagagtgaaaaacaacaaattcagttctgagtatatgcaattagtgtttgaaaagattcttaatagctggctgtaaatactgcttggttttttactgggtacattttatcatttattagcgctgaagagccaacatatttgtagatttttaatatctcatgattctgcctccaaggatgtttaaaatctagttgggaaaacaaacttcatcaagagtaaatgcagtggcatgctaagtacccaaataggagtgtatgcagaggatgaaagattaagattatgctctggcatctaacatatgattctgtagtatgaatgtaatcagtgtatgttagtacaaatgtctatccacaggctaaccccactctatgaatcaatagaagaagctatgaccttttgctgaaatatcagttactgaacaggcaggccactttgcctctaaattacctctgataattctagagattttaccatatttctaaactttgtttataactctgagaagatcatatttatgtaaagtatatgtatttgagtgcagaatttaaataaggctctacctcaaagacctttgcacagtttattggtgtcatattatacaatatttcaattgtgaattcacatagaaaacattaaattataatgtttgactattatatatgtgtatgcattttactggctcaaaactacctacttctttctcaggcatcaaaagcattttgagcaggagagtattactagagctttgccacctctccatttttgccttggtgctcatcttaatggcctaatgcacccccaaacatggaaatatcaccaaaaaatacttaatagtccaccaaaaggcaaga

SEQ ID NO: 116 - protein, 313 aa, Homo sapiens [sequence omitted]

SEQ ID NO: 117 - DNA, 2337 bp, Homo sapiens
gtgagctcgtctctgatctcgcgcaagagtgacacacaggtgttcaaagacgcttctggggagtgagggaagcggtttacgagtgacttggctggagcctcaggggcgggcactggcacggaacacaccctgaggccagccctggctgcccaggcggagctgcctcttctcccgcgggttggtggacccgctcagtacggagttggggaagctctttcacttcggaggattgctcaacaaccatgctgggcatctggaccctcctacctctggttcttacgtctgttgctagattatcgtccaaaagtgttaatgcccaagtgactgacatcaactccaagggattggaattgaggaagactgttactacagttgagactcagaacttggaaggcctgcatcatgatggccaattctgccataagccctgtcctccagatgtgaacatggaatcatcaaggaatgcacactcaccagcaacaccaagtgcaaagaggaaggatccagatctaacttggggtggctttgtcttcttcttttgccaattccactaattgtttgggtgaagagaaaggaagtacagaaaacatgcagaaagcacagaaaggaaaaccaaggttctcatgaatctccaaccttaaatcctgaaacagtggcaataaatttatctgatgttgacttgagtaaatatatcaccactattgctggagtcatgacactaagtcaagttaaaggctttgttcgaaagaatggtgtcaatgaagccaaaatagatgagatcaagaatgacaatgtccaagacacagcagaacagaaagttcaactgcttcgtaattggcatcaacttcatggaaagaaagaagcgtatgacacattgattaaagatctcaaaaaagccaatctttgtactcttgcagagaaaattcagactatcatcctcaaggacattactagtgactcagaaaattcaaacttcagaaatgaaatccaaagcttggtctagagtgaaaaacaacaaattcagttctgagtatatgcaattagtgtttgaaaagattcttaatagctggctgtaaatactgcttggttttttactgggtacattttatcatttattagcgctgaagagccaacatatttgtagatttttaatatctcatgattctgcctccaaggatgtttaaaatctagttgggaaaacaaacttcatcaagagtaaatgcagtggcatgctaagtacccaaataggagtgtatgcagaggatgaaagattaagattatgctctggcatctaacatatgattctgtagtatgaatgtaatcagtgtatgttagtacaaatgtctatccacaggctaaccccactctatgaatcaatagaagaagctatgaccttttgctgaaatatcagttactgaacaggcaggccactttgcctctaaattacctctgataattctagagattttaccatatttctaaactttgtttataactctgagaagatcatatttatgtaaagtatatgtatttgagtgcagaatttaaataaggctctacctcaaagacctttgcacagtttattggtgtcatattatacaatatttcaattgtgaattcacatagaaaacattaaattataatgtttgactattatatatgtgtatgcattttactggctcaaaactacctacttctttctcaggcatcaaaagcattttgagcaggagagtattactagagctttgccacctctccatttttgccttggtgctcatcttaatggcctaatgcacccccaaacatggaaatatcaccaaaaaatacttaatagtccaccaaaaggcaagactgcccttagaaattctagcctggtttggagatactaactgctctcagagaaagtagctttgtgacatgtcatgaacccatgtttgcaatcaaagatgataaaatagattcttatttttcccccacccccgaaaatgttcaataatgtcccatgtaaaacctgctacaaatggcagcttatacatagcaatggtaaaatcatcatctggatttaggaattgctcttgtcatacccccaagtttctaagatttaagattctccttactactatcctacgtttaaatatctttgaaagtttgtattaaatgtgaattttaagaaataatatttatatttctgtaaatgtaaactgtgaagatagttataaactgaagcagatacctggaaccacctaaagaacttccatttatggaggatttttttgccccttgtgtttggaattataaaatataggtaaaagtacgtaattaaataatgtttttggt

SEQ ID NO: 118 - protein, 103 aa, Homo sapiens
MLGIWTLLPLVLTSVARLSSKSVNAQVTDINSKGLELRKTVTTVETQNLEGLHHDGQFCHKPCPPDVNMESSRNAHSPATPSAKRKDPDLTWGGFVFFFCQFH

SEQ ID NO: 119 - DNA, 1851 bp, Homo sapiens
gtgagctcgtctctgatctcgcgcaagagtgacacacaggtgttcaaagacgcttctggggagtgagggaagcggtttacgagtgacttggctggagcctcaggggcgggcactggcacggaacacaccctgaggccagccctggctgcccaggcggagctgcctcttctcccgcgggttggtggacccgctcagtacggagttggggaagctctttcacttcggaggattgctcaacaaccatgctgggcatctggaccctcctacctctggttcttacgtctgttgctagattatcgtccaaaagtgttaatgcccaagtgactgacatcaactccaagggattggaattgaggaagactgttactacagttgagactcagaacttggaaggcctgcatcatgatggccaattctgccataagccctgtcctccagatgtgaacatggaatcatcaaggaatgcacactcaccagcaacaccaagtgcaaagaggaaggatccagatctaacttggggtggctttgtcttcttcttttgccaattccactaattgtttgggtgaagagaaaggaagtacagaaaacatgcagaaagcacagaaaggaaaaccaaggttctcatgaatctccaaccttaaatcctgaaacagtggcaataaatttatctgatgttgacttgagtaaatatatcaccactattgctggagtcatgacactaagtcaagttaaaggctttgttcgaaagaatggtgtcaatgaagccaaaatagatgagatcaagaatgacaatgtccaagacacagcagaacagaaagttcaactgcttcgtaattggcatcaacttcatggaaagaaagaagcgtatgacacattgattaaagatctcaaaaaagccaatctttgtactcttgcagagaaaattcagactatcatcctcaaggacattactagtgactcagaaaattcaaacttcagaaatgaaatccaaagcttggtctagagtgaaaaacaacaaattcagttctgagtatatgcaattagtgtttgaaaagattcttaatagctggctgtaaatactgcttggttttttactgggtacattttatcatttattagcgctgaagagccaacatatttgtagatttttaatatctcatgattctgcctccaaggatgtttaaaatctagttgggaaaacaaacttcatcaagagtaaatgcagtggcatgctaagtacccaaataggagtgtatgcagaggatgaaagattaagattatgctctggcatctaacatatgattctgtagtatgaatgtaatcagtgtatgttagtacaaatgtctatccacaggctaaccccactctatgaatcaatagaagaagctatgaccttttgctgaaatatcagttactgaacaggcaggccactttgcctctaaattacctctgataattctagagattttaccatatttctaaactttgtttataactctgagaagatcatatttatgtaaagtatatgtatttgagtgcagaatttaaataaggctctacctcaaagacctttgcacagtttattggtgtcatattatacaatatttcaattgtgaattcacatagaaaacattaaattataatgtttgactattatatatgtgtatgcattttactggctcaaaactacctacttctttctcaggcatcaaaagcattttgagcaggagagtattactagagctttgccacctctccatttttgccttggtgctcatcttaatggcctaatgcacccccaaacatggaaatatcaccaaaaaatacttaatagtccaccaaaaggcaaga

SEQ ID NO: 120 - protein, 103 aa, Homo sapiens; identical to SEQ ID NO: 118

SEQ ID NO: 121 - DNA, 1989 bp, Homo sapiens
gtgagctcgtctctgatctcgcgcaagagtgacacacaggtgttcaaagacgcttctggggagtgagggaagcggtttacgagtgacttggctggagcctcaggggcgggcactggcacggaacacaccctgaggccagccctggctgcccaggcggagctgcctcttctcccgcgggttggtggacccgctcagtacggagttggggaagctctttcacttcggaggattgctcaacaaccatgctgggcatctggaccctcctacctctggttcttacgtctgttgctagattatcgtccaaaagtgttaatgcccaagtgactgacatcaactccaagggattggaattgaggaagactgttactacagttgagactcagaacttggaaggcctgcatcatgatggccaattctgccataagccctgtcctccaggtgaaaggaaagctagggactgcacagtcaatggggatgaaccagactgcgtgccctgccaagaagggaaggagtacacagacaaagcccatttttcttccaaatgcagaagatgtagattgtgtgatgaaggacatgatgtgaacatggaatcatcaaggaatgcacactcaccagcaacaccaagtgcaaagaggaaggatccagatctaacttggggtggctttgtcttcttcttttgccaattccactaattgtttgggtgaagagaaaggaagtacagaaaacatgcagaaagcacagaaaggaaaaccaaggttctcatgaatctccaaccttaaatcctgaaacagtggcaataaatttatctgatgttgacttgagtaaatatatcaccactattgctggagtcatgacactaagtcaagttaaaggctttgttcgaaagaatggtgtcaatgaagccaaaatagatgagatcaagaatgacaatgtccaagacacagcagaacagaaagttcaactgcttcgtaattggcatcaacttcatggaaagaaagaagcgtatgacacattgattaaagatctcaaaaaagccaatctttgtactcttgcagagaaaattcagactatcatcctcaaggacattactagtgactcagaaaattcaaacttcagaaatgaaatccaaagcttggtctagagtgaaaaacaacaaattcagttctgagtatatgcaattagtgtttgaaaagattcttaatagctggctgtaaatactgcttggttttttactgggtacattttatcatttattagcgctgaagagccaacatatttgtagatttttaatatctcatgattctgcctccaaggatgtttaaaatctagttgggaaaacaaacttcatcaagagtaaatgcagtggcatgctaagtacccaaataggagtgtatgcagaggatgaaagattaagattatgctctggcatctaacatatgattctgtagtatgaatgtaatcagtgtatgttagtacaaatgtctatccacaggctaaccccactctatgaatcaatagaagaagctatgaccttttgctgaaatatcagttactgaacaggcaggccactttgcctctaaattacctctgataattctagagattttaccatatttctaaactttgtttataactctgagaagatcatatttatgtaaagtatatgtatttgagtgcagaatttaaataaggctctacctcaaagacctttgcacagtttattggtgtcatattatacaatatttcaattgtgaattcacatagaaaacattaaattataatgtttgactattatatatgtgtatgcattttactggctcaaaactacctacttctttctcaggcatcaaaagcattttgagcaggagagtattactagagctttgccacctctccatttttgccttggtgctcatcttaatggcctaatgcacccccaaacatggaaatatcaccaaaaaatacttaatagtccaccaaaaggcaaga

SEQ ID NO: 122 - protein, 149 aa, Homo sapiens
MLGIWTLLPLVLTSVARLSSKSVNAQVTDINSKGLELRKTVTTVETQNLEGLHHDGQFCHKPCPPGERKARDCTVNGDEPDCVPCQEGKEYTDKAHFSSKCRRCRLCDEGHDVNMESSRNAHSPATPSAKRKDPDLTWGGFVFFFCQFH

SEQ ID NO: 123 - DNA, 2095 bp, Homo sapiens
gtgagctcgtctctgatctcgcgcaagagtgacacacaggtgttcaaagacgcttctggggagtgagggaagcggtttacgagtgacttggctggagcctcaggggcgggcactggcacggaacacaccctgaggccagccctggctgcccaggcggagctgcctcttctcccgcgggttggtggacccgctcagtacggagttggggaagctctttcacttcggaggattgctcaacaaccatgctgggcatctggaccctcctacctctggttcttacgtctgttgctagattatcgtccaaaagtgttaatgcccaagtgactgacatcaactccaagggattggaattgaggaagactgttactacagttgagactcagaacttggaaggcctgcatcatgatggccaattctgccataagccctgtcctccaggtgaaaggaaagctagggactgcacagtcaatggggatgaaccagactgcgtgccctgccaagaagggaaggagtacacagacaaagcccatttttcttccaaatgcagaagatgtagattgtgtgatgaaggacatggcttagaagtggaaataaactgcacccggacccagaataccaagtgcagatgtaaaccaaactttttttgtaactctactgtatgtgaacactgtgacccttgcaccaaatgtgaacatggaatcatcaaggaatgcacactcaccagcaacaccaagtgcaaagaggaaggatccagatctaacttggggtggctttgtcttcttcttttgccaattccactaattgtttgggtgaagagaaaggaagtacagaaaacatgcagaaagcacagaaaggaaaaccaaggttctcatgaatctccaaccttaaatcctgtagtggcaataaatttatctgatgttgacttgagtaaatatatcaccactattgctggagtcatgacactaagtcaagttaaaggctttgttcgaaagaatggtgtcaatgaagccaaaatagatgagatcaagaatgacaatgtccaagacacagcagaacagaaagttcaactgcttcgtaattggcatcaacttcatggaaagaaagaagcgtatgacacattgattaaagatctcaaaaaagccaatctttgtactcttgcagagaaaattcagactatcatcctcaaggacattactagtgactcagaaaattcaaacttcagaaatgaaatccaaagcttggtctagagtgaaaaacaacaaattcagttctgagtatatgcaattagtgtttgaaaagattcttaatagctggctgtaaatactgcttggttttttactgggtacattttatcatttattagcgctgaagagccaacatatttgtagatttttaatatctcatgattctgcctccaaggatgtttaaaatctagttgggaaaacaaacttcatcaagagtaaatgcagtggcatgctaagtacccaaataggagtgtatgcagaggatgaaagattaagattatgctctggcatctaacatatgattctgtagtatgaatgtaatcagtgtatgttagtacaaatgtctatccacaggctaaccccactctatgaatcaatagaagaagctatgaccttttgctgaaatatcagttactgaacaggcaggccactttgcctctaaattacctctgataattctagagattttaccatatttctaaactttgtttataactctgagaagatcatatttatgtaaagtatatgtatttgagtgcagaatttaaataaggctctacctcaaagacctttgcacagtttattggtgtcatattatacaatatttcaattgtgaattcacatagaaaacattaaattataatgtttgactattatatatgtgtatgcattttactggctcaaaactacctacttctttctcaggcatcaaaagcattttgagcaggagagtattactagagctttgccacctctccatttttgccttggtgctcatcttaatggcctaatgcacccccaaacatggaaatatcaccaaaaaatacttaatagtccaccaaaaggcaaga

SEQ ID NO: 124 - protein, 334 aa, Homo sapiens [sequence omitted]

SEQ ID NO: 125 - DNA, 5931 bp, Homo sapiens
gtgagctcgtctctgatctcgcgcaagagtgacacacaggtgttcaaagacgcttctggggagtgagggaagcggtttacgagtgacttggctggagcctcaggggcgggcactggcacggaacacaccctgaggccagccctggctgcccaggcggagctgcctcttctcccgcgggttggtggacccgctcagtacggagttggggaagctctttcacttcggaggattgctcaacaaccatgctgggcatctggaccctcctacctctggttcttacgtctgttgctagattatcgtccaaaagtgttaatgcccaagtgactgacatcaactccaagggattggaattgaggaagactgttactacagttgagactcagaacttggaaggcctgcatcatgatggccaattctgccataagccctgtcctccaggtgaaaggaaagctagggactgcacagtcaatggggatgaaccagactgcgtgccctgccaagaagggaaggagtacacagacaaagcccatttttcttccaaatgcagaagatgtagattgtgtgatgaaggacatggcttagaagtggaaataaactgcacccggacccagaataccaagtgcagatgtaaaccaaactttttttgtaactctactgtatgtgaacactgtgacccttgcaccaaatgtgaacatggaatcatcaaggaatgcacactcaccagcaacaccaagtgcaaagaggaaggtaattatttttttacggttatattctcctttcccccaaccccatggaaagatgtgaagaaaaaccaatcactcttgattagtagaaagtcctttatttaatcttaaagattgcttattttcatataaaatgtccaatgttccaacctacaggatccagatctaacttggggtggctttgtcttcttcttttgccaattccactaattgtttggggtaagttcttgctttgttcaaactgcagattgaaataacttgggaagtagttcacaaagatttgcctcattcttacctataaaaagctaccactttggtagatttatgtattgttaatttcttgcccctgaatgcagccttgagagctgactgataagaacaaatgaaattattcctcagctagtttctgagcaacagttttggggcattgagtggtattctcatccttcctatgaacaggtgttctctgcagcagcagaattggccaaaaatcagaagtaattcttcactattcattgagatctccctatgcaaaaagagaacacaagaagcaaaggcattcccaggaaacacattgcagggaacactttaaaaacttgtacttcactgcctcctcttcctcggcctaattgcttgtttttaattatttctccttcttaacttaaaatactatggggacacatgttatacaaaggtgacttagtagagtcagtagaaaagccaaaattagatattatcataattagtctagaaaaatccctttaagtcattcatcaactacagggtcacaccaactttcagtaacttagaagtattcaattttcccttctcagaacaattatctgtttcttcagttcagttgaagaagaaagtttgccttgcctttagcggttgtttagctgaaaatacatttgggatatttaagcactgtaattgtgctcagagacatacagattcttctatctcacattgactttaatgcatacacctattgagtatgtatgcttgagttatttgtgtgtgtatttcatttctgggcatccatagcaagttgatgttgacttgcttgtcctacggcttctgcatcctgccatagtcttgccgtccacatctttgctggacagagagtggtgcttgccatatggtaagtcaaaagccatctccttgctaggccagcctgtggtaattagatgactaattaagatatgtcctttcactagaacacttgacttagtagtacgaaagttccaaaatcagcggtctcctgcgatgtttggccacttttaagtttcactgaatttctcctttttccttcttatatttctcttagtgtgaaagtatgttctcacatgcattctacaaggctgagacctgagttgataaaatttctttgttctttcagtgaagagaaaggaagtacagaaaacatgcagaaagcacagaaaggaaaaccaaggttctcatgaatctccaaccttaaatcctgtaggtattgaaataggtatcagctttccttgaaaagaaaaatagagaaattagtgatttggctttttgttacttccttttacttttttgtttcttgtttgtttcattttgtttgagatggagtcttgctccatagcccaggctggagtgcaggggtgcaatcatggctcactgcagcctcaaagtcctgggctcaagtgatcctcctgcctcaactgtgaccctgggactacaggcatgcaccaccatgccaggttaattttttatttttattttttatagagacagggttcactttgttgcccaggctggtctcaaacttttgacctcaagcaatccttctgcctcagcctcccaaagttctgggattataggtgtgagccatcacatccggcctgttactttctttatttaaacattgcttgtgtttgtgggtgcataggttaaaggggcctcacagatgaattatgatatggtacccaaattaaaagtaaacttgtacacaaaaaccgtaagaatcaacaaaggagggaattgagagtgtgctgaaaatgagctgaaaaaagaacttggccaacctccatgttccgtgttgttgttatccctgcagagaaacagcctttaccaggcatgggttcagtatccaagcctgagcaaagagattgctcttaaagtttgtcataagggcacagcttaactttctctggctgccggttgaccttatgtctcaccatatcttttcccaacatggtatcaatatatttcagatagcaagaaatacaccgagaaaagaaaccagttgcacttaatggaattattttcttatttggggccagggctcagtgggagttaggattctttaaattaatatggtaaaaaaaatttcaatttgagccattttctggtattaagaataagaatagttacagggaagaaaattttagagtagttatatttattatttattttaataagtctatatgaaaaataacctcaacctattttatgaattctttaggtttcttgcctttaaaaactaagacaatattgcttagtttctggcaaggccggaacctttcagaataaaaattgaatggtaaaagtaaccttcttaatcacttaatctagcttcctaattttatacatcaagcaactgattgtacttctttctgaattaaggaaaaattagaagttcacatttagaatattctaaagatatatttttatttgtctttctctgcttccattttttgctttctaggaaacagtggcaataaatttatctggtaaggcttttatcattttatttcatagagatggcatcctttagagtaataggccaatttcagagtaaaataatgttactaatttcagtgacatattatgggatcttgttatttctcatacaattctacctgctcagcataaagcatttatcaggcagtttgtttaaatttataatgagtactcatagttaaaaataatcaagtaacaataagacacaatagtctgaggcttaagaaacttttccttcataatcagctagatgtattacagaactcctgcctaaaaagatctagaggttaaagtgtactgtagactcaggtattatcagtgtacccaactctataacaacatacatgattccattcagttgttctttgatctgtgatttagagataagatgatcataaactctttgcttatacttttagatttgtgggtcattgatcattggatccataagagatgttataggtgatcttttccaatcctcttaatttataaatgagaaaagaagatacagaaatgttatgtattgtggcccaggttatttaacaaattactgggtatatggcaggatttggagttagaactcaaggttgtcttgtttctgtattcccctagtcagctcttcatagacctttaggacttagctatattctgaagtactataaaaagagaaataaacatggttttcactaatgggaatttcatttagaaaaacaaattttcagactattttctatttttcagatgttgacttgagtaaatatatcaccactattgctggagtcatgacactaagtcaagttaaaggctttgttcgaaagaatggtgtcaatgaagccaaaatagatgagatcaagaatgacaatgtccaagacacagcagaacagaaagttcaactgcttcgtaattggcatcaacttcatggaaagaaagaagcgtatgacacattgattaaagatctcaaaaaagccaatctttgtactcttgcagagaaaattcagactatcatcctcaaggacattactagtgactcagaaaattcaaacttcagaaatgaaatccaaagcttggtctagagtgaaaaacaacaaattcagttctgagtatatgcaattagtgtttgaaaagattcttaatagctggctgtaaatactgcttggttttttactgggtacattttatcatttattagcgctgaagagccaacatatttgtagatttttaatatctcatgattctgcctccaaggatgtttaaaatctagttgggaaaacaaacttcatcaagagtaaatgcagtggcatgctaagtacccaaataggagtgtatgcagaggatgaaagattaagattatgctctggcatctaacatatgattctgtagtatgaatgtaatcagtgtatgttagtacaaatgtctatccacaggctaaccccactctatgaatcaatagaagaagctatgaccttttgctgaaatatcagttactgaacaggcaggccactttgcctctaaattacctctgataattctagagattttaccatatttctaaactttgtttataactctgagaagatcatatttatgtaaagtatatgtatttgagtgcagaatttaaataaggctctacctcaaagacctttgcacagtttattggtgtcatattatacaatatttcaattgtgaattcacatagaaaacattaaattataatgtttgactattatatatgtgtatgcattttactggctcaaaactacctacttctttctcaggcatcaaaagcattttgagcaggagagtattactagagctttgccacctctccatttttgccttggtgctcatcttaatggcctaatgcacccccaaacatggaaatatcaccaaaaaatacttaatagtccaccaaaaggcaagactgcccttagaaattctagcctggtttggagatactaactgctctcagagaaagtagctttgtgacatgtcatgaacccatgtttgcaatcaaagatgataaaatagattcttatttttcccccacccccgaaaatgttcaataatgtcccatgtaaaacctgctacaaatggcagcttatacatagcaatggtaaaatcatcatctggatttaggaattgctcttgtcatacccccaagtttctaagatttaagattctccttactactatcctacgtttaaatatctttgaaagtttgtattaaatgtgaattttaagaaataatatttatatttctgtaaatgtaaactgtgaagatagttataaactgaagcagatacctggaaccacctaaagaacttccatttatggaggatttttttgccccttgtgtttggaattataaaatataggtaaaagtacgtaattaaataatgtttttggt

SEQ ID NO: 126 - protein, 201 aa, Homo sapiens [sequence omitted]

SEQ ID NO: 127 - DNA, 2475 bp, Homo sapiens
gtgagctcgtctctgatctcgcgcaagagtgacacacaggtgttcaaagacgcttctggggagtgagggaagcggtttacgagtgacttggctggagcctcaggggcgggcactggcacggaacacaccctgaggccagccctggctgcccaggcggagctgcctcttctcccgcgggttggtggacccgctcagtacggagttggggaagctctttcacttcggaggattgctcaacaaccatgctgggcatctggaccctcctacctctggttcttacgtctgttgctagattatcgtccaaaagtgttaatgcccaagtgactgacatcaactccaagggattggaattgaggaagactgttactacagttgagactcagaacttggaaggcctgcatcatgatggccaattctgccataagccctgtcctccaggtgaaaggaaagctagggactgcacagtcaatggggatgaaccagactgcgtgccctgccaagaagggaaggagtacacagacaaagcccatttttcttccaaatgcagaagatgtagattgtgtgatgaaggacatgatgtgaacatggaatcatcaaggaatgcacactcaccagcaacaccaagtgcaaagaggaaggatccagatctaacttggggtggctttgtcttcttcttttgccaattccactaattgtttgggtgaagagaaaggaagtacagaaaacatgcagaaagcacagaaaggaaaaccaaggttctcatgaatctccaaccttaaatcctgaaacagtggcaataaatttatctgatgttgacttgagtaaatatatcaccactattgctggagtcatgacactaagtcaagttaaaggctttgttcgaaagaatggtgtcaatgaagccaaaatagatgagatcaagaatgacaatgtccaagacacagcagaacagaaagttcaactgcttcgtaattggcatcaacttcatggaaagaaagaagcgtatgacacattgattaaagatctcaaaaaagccaatctttgtactcttgcagagaaaattcagactatcatcctcaaggacattactagtgactcagaaaattcaaacttcagaaatgaaatccaaagcttggtctagagtgaaaaacaacaaattcagttctgagtatatgcaattagtgtttgaaaagattcttaatagctggctgtaaatactgcttggttttttactgggtacattttatcatttattagcgctgaagagccaacatatttgtagatttttaatatctcatgattctgcctccaaggatgtttaaaatctagttgggaaaacaaacttcatcaagagtaaatgcagtggcatgctaagtacccaaataggagtgtatgcagaggatgaaagattaagattatgctctggcatctaacatatgattctgtagtatgaatgtaatcagtgtatgttagtacaaatgtctatccacaggctaaccccactctatgaatcaatagaagaagctatgaccttttgctgaaatatcagttactgaacaggcaggccactttgcctctaaattacctctgataattctagagattttaccatatttctaaactttgtttataactctgagaagatcatatttatgtaaagtatatgtatttgagtgcagaatttaaataaggctctacctcaaagacctttgcacagtttattggtgtcatattatacaatatttcaattgtgaattcacatagaaaacattaaattataatgtttgactattatatatgtgtatgcattttactggctcaaaactacctacttctttctcaggcatcaaaagcattttgagcaggagagtattactagagctttgccacctctccatttttgccttggtgctcatcttaatggcctaatgcacccccaaacatggaaatatcaccaaaaaatacttaatagtccaccaaaaggcaagactgcccttagaaattctagcctggtttggagatactaactgctctcagagaaagtagctttgtgacatgtcatgaacccatgtttgcaatcaaagatgataaaatagattcttatttttcccccacccccgaaaatgttcaataatgtcccatgtaaaacctgctacaaatggcagcttatacatagcaatggtaaaatcatcatctggatttaggaattgctcttgtcatacccccaagtttctaagatttaagattctccttactactatcctacgtttaaatatctttgaaagtttgtattaaatgtgaattttaagaaataatatttatatttctgtaaatgtaaactgtgaagatagttataaactgaagcagatacctggaaccacctaaagaacttccatttatggaggatttttttgccccttgtgtttggaattataaaatataggtaaaagtacgtaattaaataatgtttttggt

SEQ ID NO: 128 - protein, 149 aa, Homo sapiens; identical to SEQ ID NO: 122

SEQ ID NO: 129 - DNA, 2584 bp, Homo sapiens
gtgagctcgtctctgatctcgcgcaagagtgacacacaggtgttcaaagacgcttctggggagtgagggaagcggtttacgagtgacttggctggagcctcaggggcgggcactggcacggaacacaccctgaggccagccctggctgcccaggcggagctgcctcttctcccgcgggttggtggacccgctcagtacggagttggggaagctctttcacttcggaggattgctcaacaaccatgctgggcatctggaccctcctacctctggttcttacgtctgttgctagattatcgtccaaaagtgttaatgcccaagtgactgacatcaactccaagggattggaattgaggaagactgttactacagttgagactcagaacttggaaggcctgcatcatgatggccaattctgccataagccctgtcctccaggtgaaaggaaagctagggactgcacagtcaatggggatgaaccagactgcgtgccctgccaagaagggaaggagtacacagacaaagcccatttttcttccaaatgcagaagatgtagattgtgtgatgaaggacatggcttagaagtggaaataaactgcacccggacccagaataccaagtgcagatgtaaaccaaactttttttgtaactctactgtatgtgaacactgtgacccttgcaccaaatgtgaacatggaatcatcaaggaatgcacactcaccagcaacaccaagtgcaaagaggaaggatccagatctaacttggggtggctttgtcttcttcttttgccaattccactaattgtttgggtgaagagaaaggaagtacagaaaacatgcagaaagcacagaaaggaaaaccaaggttctcatgaatctccaaccttaaatcctgaaacagtggcaataaatttatctgatgttgacttgagtaaatatatcaccactattgctggagtcatgacactaagtcaagttaaaggctttgttcgaaagaatggtgtcaatgaagccaaaatagatgagatcaagaatgacaatgtccaagacacagcagaacagaaagttcaactgcttcgtaattggcatcaacttcatggaaagaaagaagcgtatgacacattgattaaagatctcaaaaaagccaatctttgtactcttgcagagaaaattcagactatcatcctcaaggacattactagtgactcagaaaattcaaacttcagaaatgaaatccaaagcttggtctagagtgaaaaacaacaaattcagttctgagtatatgcaattagtgtttgaaaagattcttaatagctggctgtaaatactgcttggttttttactgggtacattttatcatttattagcgctgaagagccaacatatttgtagatttttaatatctcatgattctgcctccaaggatgtttaaaatctagttgggaaaacaaacttcatcaagagtaaatgcagtggcatgctaagtacccaaataggagtgtatgcagaggatgaaagattaagattatgctctggcatctaacatatgattctgtagtatgaatgtaatcagtgtatgttagtacaaatgtctatccacaggctaaccccactctatgaatcaatagaagaagctatgaccttttgctgaaatatcagttactgaacaggcaggccactttgcctctaaattacctctgataattctagagattttaccatatttctaaactttgtttataactctgagaagatcatatttatgtaaagtatatgtatttgagtgcagaatttaaataaggctctacctcaaagacctttgcacagtttattggtgtcatattatacaatatttcaattgtgaattcacatagaaaacattaaattataatgtttgactattatatatgtgtatgcattttactggctcaaaactacctacttctttctcaggcatcaaaagcattttgagcaggagagtattactagagctttgccacctctccatttttgccttggtgctcatcttaatggcctaatgcacccccaaacatggaaatatcaccaaaaaatacttaatagtccaccaaaaggcaagactgcccttagaaattctagcctggtttggagatactaactgctctcagagaaagtagctttgtgacatgtcatgaacccatgtttgcaatcaaagatgataaaatagattcttatttttcccccacccccgaaaatgttcaataatgtcccatgtaaaacctgctacaaatggcagcttatacatagcaatggtaaaatcatcatctggatttaggaattgctcttgtcatacccccaagtttctaagatttaagattctccttactactatcctacgtttaaatatctttgaaagtttgtattaaatgtgaattttaagaaataatatttatatttctgtaaatgtaaactgtgaagatagttataaactgaagcagatacctggaaccacctaaagaacttccatttatggaggatttttttgccccttgtgtttggaattataaaatataggtaaaagtacgtaattaaataatgtttttggt

SEQ ID NO: 130 - protein, 335 aa, Homo sapiens
MLGIWTLLPLVLTSVARLSSKSVNAQVTDINSKGLELRKTVTTVETQNLEGLHHDGQFCHKPCPPGERKARDCTVNGDEPDCVPCQEGKEYTDKAHFSSKCRRCRLCDEGHGLEVEINCTRTQNTKCRCKPNFFCNSTVCEHCDPCTKCEHGIIKECTLTSNTKCKEEGSRSNLGWLCLLLLPIPLIVWVKRKEVQKTCRKHRKENQGSHESPTLNPETVAINLSDVDLSKYITTIAGVMTLSQVKGFVRKNGVNEAKIDEIKNDNVQDTAEQKVQLLRNWHQLHGKKEAYDTLIKDLKKANLCTLAEKIQTIILKDITSDSENSNFRNEIQSLV

SEQ ID NO: 131 - DNA, 132942 bp, Mus musculus
  misc_feature (1)...(132942): n = A,T,C or G
gcatctctcactgaacctggagctcactagtctagtgagacaaattgtgccacaagtcccaaggatacaggaaccacagatatgggctcctgtgttgggcccattgtgtggagctcaggaaatatgaactccagtccttagttttgcatggccatcactttatatactgttaggtctctgtagcctggaaagcccacactaataggttctactggtggtttccaaacacagtgttacagtcacaatctacggttctcaaagcttctatagcaacccagacagaaaaacataagtaattaaacttaagaagaggtgaagagatattgcacagtagtagaacactgtcctagcatggataaagctcctaattcaatgtccaataccatggtggggaaggggggagcaggaggcgggggaatagatccagtgtacagagaggttgtgatttctttctcatagccacagcttacagatttgaaacccactaagtaagaatagagagacccctgaaccctacattgtatcagaaaaaaactcactcctgaaagtggttctctgatctccaaatacactgtgatgtgagcacacacatgcacataaaataaagatgtaaataggtaaataagtaaatatttaaaaattaaaaaaaaacatcattacccctcctttatcctacataaattatttgatttgaaaattaatcactatacggtatatggaatttcaaaatcttggaatataggctagttttcaagtctatgtatgtgcataaccagactatgtccttgtcaaacccaattaatggttataatgaataattacacgtaaaactgctaagtctgcattcctaaaattaagaaaccattatcacactgtgcttaaggaaaggccactgaatgccagtttttcatagtaagtaattaatagtctcccaaaaggaaaacagattaaaaacctatttcagaatttcattgtacctttgaatataaatcaccatattttcaaatataagacactgaggagaatgatgaatttttaaatgtttttattaaaatagaatttcatacctttccttatcactttcaaatggatatttttaattgcacagttgtgaggtttttctgctgtatagtcagtgctgattatagagtaaacacttctgtttctagtgcctaagaatgaagtttagggatgagaatgttttgactggtaatgtgtttgaattctagttttctatataatttgtttggctttgttgttttgagacaccgtcttactaagttaatacaaatggccataaagtcagtctgttcttgaacttgtatccctctcccaagcagtatagattactaacctgtgttgctaagtattgctagaacttcctatgttccccttaggcaaaaagaagaagaatgtcatacttttgatggagactttcttgttttcatgcatgttaaagtatgtataagaaattttgtatgtagtgtgcatatttaagtatatccatttactggtagaattttaaacatttaagtagttgacaaataagacaaactgatttatattagtagttgcatgataaatgataattaatgataccgatagataatagatagaaagatgataggtgtgtaaagagagatgatagaagatagatgatagtttgatagataacagatagattgatccatagattgacggtagatagatagatagatagatagatagatagatagatagatagatagtaaacgagagatgccagaaataatagcatcaaaattaaaggagcagaaataggaagaaatgatggcttgaagctcttgcatgctatggtatttagaaagagtttatgatgccttcagttggtatataatgggaaatatattttccacaacaggtgagctatagcagcataagatcatttgaccctgctgttccagtggctgggcccccacagactgtatcaaatttatggaatagtacacaccatgtatttatgcatcttcaccctggaaccacctaccagttttttataagagccagcactgtcaaaggctttggaccagcaacagccatcaatgtgaccacaaatatctcaggtaagcaaataagtgatacagaaggtggaaggctcatgctcctggttagacgtaacatactctagacattcagttatatactgtgttcttgtagctcagtaagcctttactctcaatacctgaagtcatggttactttattcagtcatttgagaacaaatcattattggttctatgttgtaatccaaacagtttgcaaacagtcacaaaaatgacggtagtctctttccttaaaaatatctccaagttcataatctatgagagaccttttattgcacctttgagcatcatttgcctgctgtagctggatggatattatttaatgagcagcagatgacttttactctgttattagaatatctcagcccgtgtctgtcccagtttcccctacattctgataattgtaaacaaatgaatcgctcctgttcatgaaaagtgtctcataaatgcatccaattttcagaacaggagcatgaaagagattcttgaattgataagtaaaagtgactaaagtgtaatttctattacattcagctttatcatttcattgtttatagattctagttcttcagtaagctcaccagttaaaccttgttattttccagctgcacatccgtactaccactcctcctaaatgtattctagttagtaaaatactttgtcatattaagattacaaaaaaaaattgtgctatgtgttactaaagagggggttttgaaaattaaatctaagaacatttttattttgtgaattctctttatctttacactaattttacaaagtatatgattgcagcccctcccaattaacattacatatttttgacatagtcttgaatcgttttaagctttatttggaaatgtattgaataaaatagaaattttaaaactttatgtcatgaataaaagtaattctaatatttcatttgcatatgatttgattcatattaatattctagtaaaactgatgttttaaaatatccattgtattaaggaattaaaacatactaaactgtcattttatttcctaaaggatatcaacaattcaaaatatttattaggtttctttgttacaaaataagacatggtgaatatcatgacaaatttcctatcttatagggttagcaactgttgatttttctatagaaattgctgtaacatttacataagcttataaaacagaaagcattgaacaactctatatttctgatttataaatacacacacacacatacacaattttcaagtcttagctaccctgttcagcatgatgttgaacagaaaatttataattatagaccaaaacactagcctaggttttttttctcctgaattatttcagtccaattttactattgcaactcaagaacagagagaattttcttgtactttaaaaatataatttgaggactgtgaacaggcctgtgaatgcagctaggatcatcattgttgctcagaagaacccacctagaaccctcaggacacaggaactgaggggtagcctgagactggagccttctggtctccatctgtgcccagagctgatactatgccacagagctatatgcacaaataccaccaaaagaaaagctgacctcccaggagtgcctgcacacctgtgagcacaagtaagaccaccactgtgatggcccaagagagaccaccacagagccatgagaacacaggagccaaggatcagctggggacaagatcattctggtctctatctgtaccccagagctgactctgttctgcagcactccatacgcaaattcctcccagcaaaactggtctcccaagagtactgacacacaggcttgcaggagggacaagccaaagtcagagacagcaagaccagttaacaccagagacaaccagatggcaaaaggcaagagcaagaagaacttaagaaacagaaaccaagactacttgccatcatcagaacccatttctcccaccacagcaaaccctggttaccccaacacatcagaaaagccagactatgatttaaaaatcacatctcatgttgatgatagaggaatttaagaaggacataaatgactcccttaaagaaatacaagagaacacaggtaaacaggtagcagaacttaaagaggaaacataaaaaccctttaaagaatttacaggaaaacacaaacaggtgaaggaactgaaaagtggaaatagaaacaataaagaaatcacaaatgaaaacaacactggagatagaaagcctaggaaagagtccaggagacatagatgcaagcatcaccaacagaatacacgagatagaagtgagaatctcagatgcagaagattccataggaaacaataacacaacagtcgaaaaaaatgcaaaatgcagaacactcctaactcaaaacattcaggaaatccagaacacattgagaagtaggtatagaaaagagtgaagattcccaagttagagggccagtaaatatcttcaacagaattatagaagaaaacttccctaacctaaagaaagagatgcccatgaacatacaagaagcctatagaacttcaaatagagtagaccggaaaagaaattcctcctgtcatataataatcaaaacaccaaactcactaaacaaagaaagaatattaagagcagagagggaaaaagatcaagtaacataaaggcaaatctatcagaattacaccagacttctcaccagagactgtgaaagctagaagatcctgggcagatctaaaacagatcttaagagaacacaaatgccaacccagactactataccccaaaaaactttcaattaccatagatggtgaaaccaagaatttccatgacaaatccaaattttcacaatattttttcacaaatccagccctacaaagaataaggaaggagggaaaacataccctataaaaagcaagaaagtaatcttctttcaacaaacccaaaagaagataaccacacaaacaaaaaaataacatcaatgaaaacggggagcaacaatcactattccttaatatcttttaacatcaatggactcgattccccagtaaaaagacaaagactaacagactggatacacaaaaaggacccaacattttgctctatacagtacacgcacctcagtgtcaaagacaaacactacctcaaagaagagggctggaaaacaattttccaagcaaatggttcaaagaaacaagctagagtagccattctaataaagtctattttcaaccaaaagacatcaaaaagtgtaagcaagaacacttcattttcatcaaaggaaaaatctacctggaagaactctcaactctgaacacctatgctccaaatgcaagggcacatacatgcatttaaaaacaacaaacaaacaaacaaacaaacaaacaaacaaaaactttactaaagctcaaagcacacattgtacctcacacaataatagtaggagacttcaacacctcactctcatcaatggacagatgggttttgtacagagttctatcagaccttcaaagaaaacctattaccaataatcctcaaattattccataaaataaaaacaggagtaactctacccaactccttctatgaagccacaattactctgatacctaaaccacacaaaggcccagcaaaaaaaagagaacttcagacccatttcccttatgaatatcgatgcaaaaatactccataaaactctcgcaaaccaagaacacttcaaaaagatcattcctcatgatcaagtaggcctcatcccaggggttgaggcatgggttcaatatacagaaaacgatcaacgtaatccactatagaaacaaactcaaagcaaaaaaccgtatgatcatttcaatagattctgagaaagcatttgacaaaatctaatgccacttcatgataaaagtcttggaaaattcaggaattcaaggcccatatctaaacagagtaaaagcaatacacagcaaaccagtagccaacatcaaagtaaatgatgagaagctggaagcaatcccactaaaatcaggaactagacaaggctgcccactctctcccttcttgttcaatatactactcaaagtcctacccggagcaattagacaacaaaaggaggtcaaagggatacaaactagaaaggaagacagcaaatattactatttgcagataaaatgatagtatacataagtgaccctaaaaattcccccagagaactcctgaacctgataaacaacttcagcaaagtagctgaatacaaaattaactcaaacaaatcagtggccttcttctactcaaaggataaacaggctgagaaagaaattagggaaacaacacctttcaaatactctcaaataatataaaatgccttggtgtgactcttactaagcaagtgaaagatcaatatgacaagaacttcaagtctctgaagaaagaaatcgaaaaagatctgagaagatggaaaaatcttccatgttcatggattggcaggattaatatggtaaaaatgtccatcttgccaaaagcaatgtatagattcaatgcaattcccatcaaaattccaactcaattctacaaagagatagaaggacaaatttacaaattcatctggattaacaaaaaacctaggatagcaaaaactattctcaacaataaaagaacttctggtggaatcactatccctgacctcaagctgtactacagagcaattgtgattaaaaacaaacaaacaaacaaacaaacaaaaaaggcctggtattggtacagagacaggcaggtagatcaatggaatagaattgaagacccagaaatgaacccacatacatatattcacttgatctttgacaaaggagccaaaaccatccagtggaataaaaacagcattttcaacaaatggtgctggttcaactgtctgtctgttagcatgtagaagaatgcaaattgactcattcttatctccttgtaaaaagctcaagtccaagtggatcaaggacctccacataaaaccagatacattgaaactaagagaaaacaaagtggggaagagccctaagcacatgggcacaggggaaattttcctgaacagaagaacaccaatagcttatgctctaagaccaagaattgacaaatgggacctcataaaattgcaaagcttctgtatggcaaacaacactgtcaataggacaaaacggcaaccagcagattgggaaaagatctttaccaatacttcatccgatagaaggctaatatccaatatatgcaaagaattcaagaagttagactccagagaaccaaataaccctattaaaaatgggtgcagagttcaacaaagaattctcaattgcggaatagtgaatggttgagaagcacctaaataaatgttcaacatccttagtcatcagggaaatgcaaatcaaaacaaccctgaggttcaaccttacaccagtcataatggctaagatcaaaaactcaggtgacaggaggtgatggtgaggatgtggagaaagtggaacactcctccattgttggtgggattgccagctggtacaatcattctggaaatcagtctggtggttccttaggaaattagacctgaacccagcaatacctctcctgggcatatatccagaagatgctccaacatgtaataaggacacatgctccactatgttcatagcagccttatttgtaatagccagatgctggaaagaacccagatgtccctcaacagaggaatggatacagaaaatgtggtccatttacacaatggagtactactcagctattaaaaacaattaaattatgaaattcttaggcaaattgatggatctggaggatatcatcctgagtgaggtaacccaatcacaaaagaacacacatggtattcactcactgataagtggatattagctcagaagctcagaatactgaagacccaattctcagaccacatgaaggccaagaagaaggaagaccaaactgtggatacttcggtcctccttagaagggggaacaaaatacctctgggaggagttacagagacaaagtgtggagtagagattgaaggaaaggccattcagagactgtcccacctggggatccatcccatatacagccactcaatccagatgctatgatggatgccaacatgtgcttgaggacaggagactgatatagctgtctcctgaggggctttaccagtgcctgacaaatacagacgtggatactctcagtcaaccattggactgtacagtgtccccaatggaggaactagagaaaggacctaagcagctgaagggatttgcagccccatagaacgaacaacaatatgaatgaactagtaccaccagagctcccaggtctaaagcaccaaccaaagagtacacatggtgggactcatggctccagctgcatatgtagcagaggatggccttgtcattcatcaaagggaggagaggcccttggtcctgtgaaggctctatgccccatagggaattgccagggacaggaagcaggtgtggatggattggtgagcaggagggaagaggaaggggatagggtgttttcagaggggaaaccaggaaagggaataacacttgaaatgtaaataaagaaaatatctaataaaacaaataaacaaacaaaagaaaaatacaattcctgttactatgatttgaacttattgtgaggttgttgaaattttaagataatgcatagctctctacccctttagtctagtagttttttccctctgcatttttaatattaatttaggaagatgctgaagttttggctcagtggttaacagcattagctagtcttccagtggattccctgaacccagacgtgatcccataaccatttgtaactctattttctgcagatctaatagagtctcctgacttctacaggcacaagcatgcatgtggtgcacattcatttgggcaaaacactcatacaaatacttattaatttgtataaaagtgtactactcttgccaaattaactgtgtgtatcttttgaatatttgagtttactgagtatatatttatatatttatactattcggcttcacaaaatgttatcttttaattctgattccatgtcaggacctgtgttatgtcttcatgtctatatcataatcatacagatttgtatatgtttgcttttagcaagcattcaatgaatggataatttttttaaagtatcacttgacttttcaagcataactgataatctacctgttttaatagatctcattcccttagacatctttctacatggtgcaaactaactgaaattccttcccactcaaggttagcaaactctcagatcacaattaaacactatccgatattttgaaaatgtgtgtgttcaactaattgtgaattaatgtactaactcttggcaactgaaaactataattttctttctagttcaccagagctaacaattatgtttcccttgtggtcacatgaaactggtccaatgatgatattggacctttctttggcttatttaaaatgattggctgtaaccaccaggctgcccatagctccctgcaggcgtgcacagcccaggccttcatgtgtgactccgcagctagggcagagtctcctcctccaatcccaccccttccttgctgggttaaagatcttgagaagctgaaattaaagtatctacccaaagttttttgaatatgagtgcaagtccccagacagctttttaaaatccaacaacgtcccctttctagcttcttctgctagggttaaggttctgtgtcatgccataaaataaggttcactgcagttaattaggaattaaattgatttccccttaagggaaatcatttattcatagcaacctataatatgtcgctatgagtcgattgaactttcgcttcgcctcgttgatctcttttcagctccaagcttacctgactatgaaggagttgatgcctctctgaatgaaactgccaccaccatcacagtactattgaggcctgcacaagccaaaggtgctcctatcaggtaagggggtgggaatggtcaaaaggaaaagctgccagtgagagaagtgtcttcctatggttcttttcttcctatgatatggttattcatttgaacaaagattgcaaatagacctgtagttaagaggggacttccaagggtgtttctgtcccatctaagactattgctgtctgtattctgtttcatttcacttcctctactgggatctgtaccttgaaggtatttgtcaaataatctgaggaagtaattcttgtccaactctgtgtatctcttatgagtaatttcacgtgagagaccaaaatcacgtgaggattttgaaagaaatgcagaagaataaaagcagatcaagcccctgtggcctttcagctcttaaattatcagaaatttcataataaagtgcagcttactggttcctttatcttttaatattaaaatctttcctattacctactactgctattctctccaataaaaaatctgatccatgtcaaaaaatatactagtccatgtcatttttagaggttaataaaattatttcagctttttatattttgaacaactacagatgaaccttcaaaattctgattgcaaccaatagctatgtgggcattttgttaatcaatattaataagaaaaccatataggtataaaggtaaggcacatctgagagcaggattgagttttgtgctgtttataaatcctttcaaaagccggtcagtctctgttctgtatgtaaaaccaatatccttgacttaaagaaactgatgtcttttgtcatcagagttgtacagtattttttcatgaataaaaaatatgttgatgaacatgagtcacaaagaaaacttgcaatccccatctagctaaaattcagtgcaccaccacattccagaacaagagaggtcgctagtgtgcctgtaacatagatgctctggaacatcagctacttgaacatctgaagtcagtatacagtgctgttcaggaatcgatctccaaatcattttgattgctggtatgaagaggagtagaaaatgtctcattcagctggacttggtgtccttctctattggcacgtattcatcgccattcacatgtccctagtagggacaaaacttacaccataggcatttaatcagttcctgatgtttaagaggattccaggtagctgtatttctcttttaaagtttgccttggtctggagagatggctcagtggaaagagcactaacagccctttagaagaatctggttcaacccctagcactcacctgttgactcacaaatatctaaaactcctgtcacaggaaatatgatattctctctggcatcctcgggcactgcacacatgtgctacacagacacacattcaaaaaaaaaaaaaaaaaagtcagcaaaacaaaaataaataaataaataaaatttaaaactatttgaaatccctaaaaatgttaagtgaagccatctttttcttcaggtattattatcattattattgtcaggctgtgctgtataacttatatgatcctttgttcacttaatcaaatttttttctgcaaattttgaccatttattaagtgcctgtcacccatcttaatattataaattaaagatacactgatcataacacaacacagtgtctcttcccaggtttcttagggtatcaggggtcattctatcatgtagatcctgagctaattgacagtgctcaggaattctgtgtattttctatgggtttgattaaacgactttcttgtcttctgcttgcctttatatatgcatgatttctaattactaagaattcataaggtctaaaccagcaactatacaaaaataattcttaatagtcatttatctttccctggcatggaaatgtgcctcattgtatttgttagcaattcctggaattgagcccactggctaggcactgcaaattatatagtacagatgagtagttctcagaaaacaagttgaaggactggagatatcattcagtaggcaagactgcctgctgtgcacacaagaagatgtaagtttgaataattggccaataaaccctgtgcaagccaagtaatactatatttgcctatagtaccagaattgggtacagataaaggccaatcccaggagctctttgaccagccagcatggctgacatagcttgcctcggggtcagtgagggaccctatccaaaaataaggtggagagtaataaaggaaagaactcaacatgctcttctggcctctacgtgcatgaatatgggtgtacacttgcttataccacactcaaaaacatatgcacaaacagaaaactgactttataaaataggctattcgaataagaaataagttactgtgagcatttgccaaagttagtaagtgaatgttcctaaaagggaagaggagtaagagtgccaacatgttaattcagtcaaggccatctttatttagcagcatttgcccggagcgcctgcaggtggagccagcaggcagggctacacacacttaagtagacagcactgcagtttggcatttgctgggtttggactttgcttcccttgcttttggcatcctttagtccagtagtaccttcttccccactaacaacttccctccttccaaccatgcctgcaagacactggggtctgattctgaggtagtccagtgtcctaatgtctttaaagtcagagtctcatgtgatggggtggtcaattttcctagcactgagtctgtggtctgattctataaatcatttcttggatcctatcatgccatttcgactttcctgtaaagtatttactttctgcttaatttcttgcggcttagttaccccctctgctgtcaatgttactgctgctctacgttgtgtcttcccaaaatatcagatctcttaacctccagctaaccctgaaagcttcccactagtcctcagtcatcaatcctgaatattgggtctatcttcccttcctgtgatactgttagtgtttattagcttacatttcacggtccatttgtcccaaacctacaacaaatgggctttctttttcttgaacttcttaatgagaagctctccttccagatcctctgttacagtaactaagaaatcctccttactcagcactagtgcatttactttatttagcataggcttattttaaaacttaaattaacagtgattcccacaaactcacagattccatagcaatctttgcataccaggagttcatctggatatctgaaataggcatccagtgtggagtgtgagagactccctgataatacaatgcctgataacacagagagaaatttttattaaggaggggaagaaatgaagtctgccaaggttcactttgagaagagattatgggtgttcaaagagatcacaaagaagtgatttggagtactgctttagtcccagattttctgagcctagtcccccctgacaatgaggccatggcatcatgaatggtatccatgaatgaatgatgagagatgagatttaaagagaatgtggtgtaattatgacttctccagccattccctccacctcaaaggaagtatgagttggagctacaagactatactcagagggaagcagtcaggacagaagtacattaactttatattaacactgtaaagaggatgaggaagccctcgaatgtgtatggcatgtagatcacaggagtccttgtaacttcaaatgaatagtccatattggaaaatagtgagagcaaaagagataaatacagggattcaggataatattaatcccagtctaaaggatagagtctgacttgtaggatgaagggcaaaactgagacaaaattgcacgctgaaagatggggaaagattacagggagtgaggactgatttaagctaatgccgggattttgagtttggtgatttggtagcccgataactcttacatagagagaaggaaaaagataagagaacgggcttttacatattaggagtgaataaacaaagcacctggaatgcttggccatcaggaaaaatgactaccataactcttctgactttcagaatgctggcagtaggatagaacaagccatgtctcaatggggaaggatcttggaaagctgttttcacatgactctgaaactttagagatgagtgtctgtctcctgcagctgtaaggatagattcgtaaaatatgaaataacatatgtactgatgtttactttgcttttttcttgtcccaatgctttatgcagcgtaaacctatagccacactcacagattagcttggtaattgtattgttgttgttaagtctcacggcagactattgtatgcagctttgattctagctccatattgataagcatcttatcagtgaactgtccacagtataagtcacatactctctgtgcaacagcggaattcacttctgctccttgaaatggaagggcagttgttctgtgtcctatgccacaaaactaagaattacttttagctgtgtttaattaagttttattgtggaagccaatttcacttctaatttttaaacacacattatatttgggttttaaaggaagattctaacacctatatcgtgatttaagttaatcggtaatattttaaacttttaatgaaaatgaatagcaaagatgacaaatgaataaacatattaaaagactatggaatattttgaattattagtgtcccaatctcttctaatgttttaaacttaactattgttaaattctatttgataatttaaaaaccttaagaaacaaaagcatgcacagtatagtatcagtaatagtgtcagggatgagtactcacccatgagatggatactaagttgggctggtcactggttggccttcccttccgtctttgctccatttttgttcctatattttgtttagacaggagcagtttggggtcaaaagttttgtaggtgggttgcagagctgttctctgagaggctctaccaacagccgactgagacagatgcagatactcacagccaagcattagactgaggccaaggacccctatggaagagctaggggaaggactgaaggaaccaaaggggatggcaaccccataggaagacccaaagtatcaactaacctggacctttgggaactcccagaggctgagccatcaaccaaagagcatccttggacttgtctgaggcccagcacatatgaagcagaggactgccttgtctagcctcagtgggagaggacatggttaatcctgttagagacttgatgccccaggggtggcaattttaattttaattttttgtttttttgtttttgctttttgttgttgtttttcaagacagggtttctctgtatagtcctggaactcactctatagactaggctggcctcaaactcagaaatctgcctgtctctgcctcccaagtgctgggattaaaggcatgcgccaccactgcccggcagcatttttaattttaaaaactgggatatgtgtttgagccacactctctcaaactgaacaatgagggaaaatgtctcctttctcagcagttgctttgagttctgtctgagcatctgtggtatttctcattgtagtgatgttcacttgtttcaatagcactttttactgcatgtagacactttttaagttcactgtgttataggcaatccaatacaggtgagccccaggctttcatagtatgcttaagaaagggagaaatagacacacaggggtcttagcctcagggaactgatgaagggctaaggtccattaatgacagtaaagtgctattcagacttcagccagtgttgttgcttggaaagacactttggagtgttgtaatttgttggcaggaaaaccacagacaggtataaacccaacatttttttattccagaaaggtatttccagtgatgtcatagaagagaaataatgaaatcaacttgaggttggtttaactgtaaggagggaaaagatgtgtgaagctgagttacagtgacagagaaaagcacttatgagtcgctttctttttacacacaaacccagtgaacttcaggggttcaaaatggaggagtcttaaagatggtagtattttgatttcatatgaaataaatattatattatataatagatgcttaaatatattaaataataagtatatactatattaaacatatttaagtattattacatattatcatatattatacatatgagggctacatacttttgaggattacaaagcatttcaacaaaatagaagcctggcaatttcaaaaacaggaaagcaaatagaaagttgagaaggaggggtactttttcacttcagaatcctctgtgcctatgcagaactgcccagtgctttgttgttgagtaaagtcagtgaagcagcaagcagaagtaaattcctagtaaggatgctccttaagcaaagcttcattactcaaacatgttgagaacttttgaaggattagagatctttttatctgagaccaaaaagtgaatatatttgggcatattctaaataataacctcaccagaaaaaaaaaaagtgatttgctcatcctacaaatgcctagttaaatgtccattatcccatttgaaaccacacttgaatataaaattaagtagttcctgtgtcagcttatggaataaacattgctgagactaaaaaagacccaggcccagagctaagtttaatgaagtgaagatgcttgtcttgatgaggcagagtgtgtgtgaaagggaggaacatgtttcccaccttatttcagtcattgcacaaagagcaatctagacaatattcttggaggtaagctttctgaagaaaaagtatgcatatactcagccttatgttttcataacaaaatccaaggggtctcaaaaacatacatttagttttcattgctccaatgtctaggaaacccaatctggtcaaagcagcccttgctgagacttcatctaagcctggttgctttccatggatctccatcaccaaatatcacatcctatggttgaaaagatttcacatgtgaacggtggacggggtcccagacatttggtcattacacaagaaggaagaatggaaggcacatggaaaatttaatagggcctcatatctctctgcctcaggtttttagtagtagtaacaacggtgtgcttcatttcgtaagtcatctttattagtaaataaaagattaattaaaaggaaagcccatgttaatgtgggaaatttacatattttatacacctcatagagtcatcccttctgtaaattttctctttaaatgaaatatgtgaaatctttagctcggtctagcctgttgattatctcagttggagccaggcttaaggttctaaagtgcagaatgaacttgcctctcttcccttctctcccccagtaacagtttgctttgctccacataagtctggagagccccaggctgggttgcatagctcctgaatttaattgaaatggaaaaaccatgaaagtagaatgttaaatatgtcaaatgaatggaatgaattaagagttagcatacactagattttttttgagatgtatgagataattaagaagttgggttttttagagattagtttccattatttagctaagatagataatcaccattctgtttgttagagtaggtgcataaacgtaaatttttctggagagtgtaatacatctattaatttttgtgtagctgtatacacagggcacagaagtatataacatataattatggataataaattcaaaataaaataaggattaggtctacctagcatggcatatggcaactaagctcttttcttctttgggtcttcagggtctgtctgcttgctagttcctatattgtccatagtagacaaatgcttgtcccctggatgaggcagaaatcaggcatcttgtcagtagctttgctccaagcgtggtgacccaacttggcagaggtacagtttccatagtgtaaaataacagatgtctgccttggtcacaagctcaaatctcagtttctgccattgatatcatctatgtcctttttcaaaagagaaagaaataggcagcagccttttgacatgttagcagtactttaacaggaaaacaaacagaaacttcaatattaaagaagaaagtaaaactctaaataatatcatcttttctttgaggctgtggagtctcttgcttgtaagtataatggctcatatttaaattggaatgttgctttaaaccctgaatttctttcaatctcctagatgcacacttgattttctctcttggtctctctggaaattccttaacaaaaagcactgtcttgcatcttccaccctactacagacctattgaatgctggctgtcatccctctctagaaagcctggatcacattttagaacagtggtttgaagccttcctagtgcggggcccttcaattcagttgtcatgttctggtaaccacgccccctaaacatgaagtatttccattgcttcttcataactgtacattgcctactgttattaatcataataaaaatatctgacatgcagggtatctgatgtgtgacccctgtgggagtcacaaaccactggcctagatgaaatatatttgcttaaagtctcaagatttttacatagagacctcacccacaacttattctcactgaatttaaaagccacagtgaatttccttcagttttcaacaattctaaaatatattaattgtttgtacattcaaagtatggaaaatatattagtagtaatggcaaacttttagataatatttacctagattatttcacttgagacattttccacaaaggaaggacattattgacatatgaatttgagaaccttacaaataaatgatcacataaatctttatttcaaatttgtggggtttcatttaccttacaacataaaagctgttgtggaaaagttctaatgtatttaagaaaaggattcccaattcaggttggagttttaataggccaaatgccatctgtctctccaatttgtaacattttattattaacaagccctgaagaaggagccagtctatttctgttgtggggacagatttgtgtccatctgtgcccgccctgtcgcatgtcacttgtgcttcggatctgcatagctgtgaggcagtagagatgcaggcgaggtcaggaggtggagaagcctgtcagcgcctcgagtgtccaagcctgtgacaactgcagaccgtagcttccaatgcctcctggaggccaccattctgttgggccttggagctgcgccttccctgatgtaatttcacgagaaaatgttaactttttctatttaaaaaaaaaaaaaaaaaaaaaactaagacaaagaacttaatctatgatatgactctggttaaagccaggtccttattagagaggcttagttttcggtctttgaaaatgtgaaccattttaaggtgatttttcttacttgtcttagttccttgataagctcaccactgtggcagcagaactctcgagacaccattttatgggaaaggggcttaatgatggttacatgcactgggaagccgcctgcccactctgaacctcctgttcctttctccaaacatcttaatatgttagatactaagtgtgaacatttctttctttcccccaaagtgcttatcaaattgttgtggagcagctacacccacatcgaacgaagcgtgaagcaggggccatggaatgctaccaggtaccggttacataccagaacgccctaagtgggggcgcgccctattactttgccgcagaacttccccctgggaatcttcccgagcctgctcccttcaccgtgggtgacaaccggacctataaaggcttttggaaccctcccctggccccccgcaaaggatacaacatctatttccaagcgatgagcagtgtggagaaggtgagattactctcagattggatatttttccccttgatcttaagtaaagctgtggctatattttataaacactcagtggcgtttgtcaaggaaaattgaaaaagaaaacaaagggaaagaaaatggatgtgtagtgcttctgttgccagctcttgcaagttgactgaaggactgaggctgagagccagcagcatttcacaggattcctgtttcctagtaactgccttagctcgcgctttcttcaggaatgcccacagtgcaactgtgaacaaagtgatttgaaaaggtgggtgtgctgccgccaggactccaccctcagtaaattccctgcattgttctgcctcacttgctcagtagtggctgcttcaaaagattaaatttacttcaggataaacagaatgcgcgttccacactgggctaataaaggccttataagcttttcagggggtacatgccaaataataaataacaagtaacaatcctctgattacaaagtaatgggacgcctgcggtccagctgacagaacctaaacagaaggctgcctgctaaggctgggtgctgagccattactgaagttggctggccctgtccctggctgcccctccttttcccattttggacacagttgtttttgaacactggggctgatcccaaatgaatattgaagaggagcgctcagcgggacacaagtgagaaacaacctagccttttcctcccatgctgtttccctttgaaagactttcttttctaagacttattttgtttttatttatttatttctatttgagataaggcagtagggtaaaaagaatatgttgagaaacttgaacaattttcaaatccagacgaacactggcattttgatgggcttgaagctatgtgggaaatggttgcttatgtataactgagtctgtaaggtgacacctgggagaggatgtaaagtatgtgacaaccaattgtatgagtcatattagctcttagaatagtttaattggaagacaaccaatgtgtacgagggccatgagggtgtgagtattgcttttatatgcaagttgtatttttatgcataccagtgtagccagtgtagagttatggcaaagaaaagtgcccaataccctttaaatacatagcgtacatgcaaaggctgtccatagttaaggaggctctactcttctcactcttctttaccatccacaccacctgctatgaccaaatgcctggctagaagcagtttaagagagaaagggtttgtttggattaccagttgagagttacttctctggaacaggaggcagggcagagagagtaggtaggaagtgagcggtcatagcagtcttcatgcagaaagtagagagctaagagtcctggtgttctgcctaacctctctctctgtctctgtctgtctctgcctctctctgcctctctctctgacctgggatcctcatcctatcatttttgaaaggtctttctgcttcagtgaatttatagataatgcccaacagaccttcccataggtttgtttcatggtaataatttccatcaaaatgacattcaagattaacaacccatcttgtatacacacacacacacacacacacacacacacacacacacacacacacacctattttaaaagtaattgactaattaggttgctccaaacagagacatggtaaaaattagtagccccacctaaatacaaatagcacacaggtagaagagggttctagatttaaatttttgtctttagagacgtgagaatttccaaattaactctgttcacctgtctgttgtgttgtaagagtgaagatgaatgtatgtacatacaggggattttctctaataccatcatttgaccaaagtttagcagcattctcaacctgtaggtcatgacagtttggggggggcgggtcaaaagacccttccacagggtatcatgtaagaccagtataaagcacagatatttacattaagattcatagcaatagcaaaatcacagttataaagtagcaacaaaaataattttataattttaccgcaattgcacgacatgcggaccagtagtaaaaggtcacacagatcagcaatacacttcccattgccgacacagagctttaacgtggatgagcctcataccagtagagtctggtaatgcctacagagagtcaactgggactactctcaggaaatcagaatatctcaagatctacacaggagcacgataatcgctggtcccagtgaagaaacagaaggacctgttcctctcccagttctttagtttacatactttcaaagtaatttcttgagaaggaattgtatgcatattgctttatttcttatcaacatataaaaccactgaagatagatttataaaatgcttcttaaagacagcctcgtttttcagaaaaaaaaaaaaaatgtgaaacctggctaacaggagaagaaggacaggatggggagaagattagacagatccagaattacataaaagcaatttattacaatcatgtggagaaaagtctgttcataccccaaggcagaagaaagggagtgatgtgctgagccctgtctgactatgatatacccaatctcttcataagttattatgtttagtgtcacctaagcaacagcctgtgtggcagtggcaacagaaatatatactccattataagtcctttgtcctttggggtttggaacacataccagtaatgtttgtaggacacactggcagttttgatcacagcggtattatcaaactggatacactcactgactttgtttgctgtctcttcttgcccattgaatattcaaagataaacacagagttgtgagggttggatagctataatgctatttttgtctatctggggagaccaaggaaaaactcatagaggagaactgtttatcaagacactgtctggaaaagaggaaaaaggaaaagaaggagagaagaaaggaaaggctagggaatgaaggaagaaaacgaaaagaaagcaaatgcagaagatagacaatggctgaagtaggtgtctaagagggagaccagagcccaagtctccctcgtaaagctgtgtatctttttctaccacataacaataataatttttgtttcttctgccttgcatttctattttttctagctaccttggtaataaaggtaggaggaaaaaaaaaactgtgttgaaaaacatcttgtttctgacagctaaattcaaaggaaagaaagaacagataaattacatttaaactgcatgccatgtcttgataatctttctgacaacgatcatttagctcttcagtcatgcctagatccacaagagagtgtgtaatgatcaggtttgttcaaagtctgtagctatcagttgaaaataaaattagaattttgttctgatttatattagcttttcagatacatatttctttctaatagcttaagaggcagcaaaaaaatgcagattaaaggccatacaactcttccctgccatacctaagcttgctttattaccaagtgaaacagatacaaaaattactagaaagtttcttatttttttaaaatttttaaaatgctgagactatttattggaaaagaaatttatctttataattctacagtcataattattgtttaaacttctgcttatcttcataatagttataacagtttatgaataaacattgtctctatattaatcgctttcttttgggtttactctgccaggaaactaaaacccaatgtgtacgaattgctacaaaaggtaagagacttacctttttgtttccacttggttttgtcttgtttccttgcttgcttgcttgtttgctttcttgcttgctcgtttttgttttgttttgttttgttttgtttttaagtccattcactactcctttctgaaatcagagtttttggtcattgtttcagacctattacatgcagtgtttctattatagggtatttgtactgggtccagataaaccccacacattttctctgactcacttgggtgtctctaagacaaagtgaagttctacatccactagtgcttaaaactacaggaaccttgttacaataacaagatgaattttgaaactttagaatggcatatctctacacttagggcctgagagagtgaatggtacccaccagccaatcaggaaagcttcgccaaagcagttcaaaatacttacttcaaaatctgttaactttgtgtgatagacagatcaaacatgtttatgtagatgcgtctccacagtcagacaaacacctcagtagtatttggttctgacttacaacttacaaagttaattcaccaatacggcagcaccggttccaagacttcatcactggaaggaagacattttcatttttcttttcggtttaactaatgctgggaaattatgtctgaaactctggcaaccggaacaatgcctgctgaccccacctattgtgacttagctggtttgatgatgatgatgatgatgatgatgatgatgataataataataataataataataataatatattcatatttgaatgagtatttggcatttagcatggggagaagtctcctatacctctgtgtattaccctttatttaaaaattgattggtccaacaagggagagtccaccactttctctgttctagcagcaatggagagctgtctgcatgcctgcttgcgcctacatagaggattgttcctctgggatctctgttgccatagttagtttctgatacacatttgtgagtgaagctgattcactggggataacaatgaatagccatattctgtttatgttggcatcctttctttcatcccatctacccatcaatctgctcaattagcatttgtttttctcttgatttgtgcaggcaataaagagtttccctttgactcatggggctaataaagaaacttcacagatggggaaaaaaaacactactgatttcattcccctactaagattcctcatgatagtttaaaaaagaaataattaagtaactctagtgagaagaaaattatatgcagaagcatctaatgtgcaaacttcatttattttaagacttgacttgtaaatcaggagttaaggccgaagcttctgggggttggacatggaagacagtaagttatgtatcacctttgctttttcagatttaaagatgaccctaagaatgtaaaaggtactcagatcgggccatcagtcctttagataggaaaattctgtatttctctaacaggaaaagaaaaaataaagaaaagaaaaaagaactgcagtacttggaacatgtcaaattttctttccattctcttgtttttgcgtgagctgtctttcagtcactctgtcctcttttggatgacaataaatgcatgatgtcaaatggagcagtatctatgctccagggaggattatagatggtggtatttgatcttagcatgtgacacagaacattagcaagcagcctggagggtggctaagaagatttctgtttgtggtcatttcccttgttctcgtgaggttttcctgcaggtgacagactggcatactctgcataaagactctggccttagactatctgggttagatcctgattttgcctctcagctttggacaagtgactaaagctgcatttaccaaatgctcgtaataaaatacttatcactctactttttgaagatttagggaacatattaaatactctgtcctcatttggggtttcctttcttgttatctatgatatatcttgcttcactctgcccaggacccgagccacccctatgtccacagcttttatggtgaatacactaaacacctgtcatataacttacaaaccaccttggtactagatcacatgttgctgtgttgctctgcttgtattcatgaacacctagtttatttaataatgacttcaaagtacaaatggatttactctggcaggtattatagtgtatttctataattgttgtgccttattataattcacaatatcttatatctaatttatattatactttatcataatcatatacatgtagaagaagtagtatttgcagaatctaatattatctgtgattttagtcatctattggggctcttgaaacatatccgctgcagatgaagaggctgttacacacacaatgctctttgaacaagccctagaatattgaagctattacttatgttaagcactgtttttataccttagttatacagtgcatcagtatcttactaacagacctctttagaagctcatgtaagagcctctgtggtttctgtcactgctttaaatctagaatatcacagtgtcccggccctaggtgaacaggtttttaaccttgcttttgaaccacgtaaaccattgtatgcagttatggaaaaaacatgaataggaaagtaaaggtaaattgaagatagaatatcacacttagtaaagtgacactgtcttattgcctcagtgcacagtaaaaaagtaccttatcattatggttgccttttgtctgaaaattttcagcatgaagataaaaattttcagacaaagcatcttgaagacctatttgatgatcaaaatttcattaactgcacatcctatcaaggggtacaaagaaactttccagtaaaggactgactagttaaacaagtgtgcacttttgttaatgactgtctaagccatatacatgtatgagatgtgtgggctttgcggttatgcatgtatacataggttcattagtagatttcttgattttttttttttagagaaaggtaataaagtgatgagaactgtataagtgtgcgtaggaacaatgctgagtccataggcagatctttggcacgtgggagactgcccctgatgctcagggaaacaaaatcatttcacttctcaaatagtgtcaacaaaaggacaaccgagccagggttggctgggatgaccagaaagttagaaaacactccattgtaatctacgtgacatccctatggggtcatcctgtgtcccacctctacattcctcagaccctacccctgtcttcacctctacacccccagctacaagtactaagaaggtgggtccctgcttcccaaatgcccttcatagataagtcaagtttgctgagaagagcaggagtcttttcaagtccagatgtatctgttttaagatattctagttttccatgttgaatacagttagacaatgtgtatttgcttggttttttttaacttaaatacttaatcaagatgaattctgtgactcaagagtctcatatatcactatattccagggacaagtacaagatgaaagtcttattatgtacgacaaatatttgttcaattgataattaaatttaaatctgaggtatatagttctgctttaatatttaatcaaactggttacagcactgcctgcatttctgaaaagtagccaagcatgggtatgtaacaagttgcatatgtagcagaggttgttttgtgtttcttgacatgtgcatttatatgtcacattctagttcacgaaatatctcgaaagctgtgtgagtctggttaacaagagtttgtaaactgatacatattaagtttaatgtacgttttctttggatgacctgtggctagaataagtgatagtacatgatctcttcattcaaatatcgatttacatacataaataagacagtttagctaaaatgcttcaacttggtcactgcgattctataactttgttggttcccaggatgaagacagtagtcaatgtcttaacaagaactaaatggtttgatgtatttaagcagaaactctaaaggaaatatcttattactttgacgttctatggagccattgtggtaaaagattaaaattccattaaacattgtatgaatgagtgttccttagcagcacaaaaatatgttttgctgatgtgaacctctctgacttcatttttatgtattaaaatattatctgcagctgaacataagaactctgaacattaattacaaaactcgaactagaaagttaaaaagggatattgctgatttttcttttgctaaagtcagttctcccaataacctctatatgccaggaatattcttcatttaatgttattttcttaaatcacataacaaggatgtatatggttccttcgtaagtagactttcatcccctccctcccaaaaaaatgtatttctcatggaagaggaaaggccctgaactttaaagggcttctttgctctcttcctagcactaccctagctggaactcagatatatatttatatttactattagagaaaatgctgtttgcatggtctactgcctgatcagatacaggtaggcagtttgtgtctgagagttcctattaatcaatacttcattctagctgcatattcttgccatgaatgagtagagataactccagcatcttcactcttctttcttatgccataaatgtatttaaatagcaaaatgagaatgggcatagactaattggttgaaaactttttcaaattaagtaattagaggccattctaaaactaaagattagtggattctggcttttaacaatggatgtagtaagattcctcagttcagataatgtgcttgacttgattcatagtattgataaactcttttataatgttaattaccatgtaattaacattataaaaatagggtcagaatcttaacataaatgtaggaacactgttcttattctttatgaaactaagggtttctctatcaacaaacataggaatagaattcattaggatatagttgatattttgacttgctttcagtaaagttcctgttttaatactaaaatataaattattaagttcagttaatgtaattaatatcttgaaatattcaatagtttagcttggtgtggtggtatgtagctaaaatgccaatattttagcaacagaaatagaaatattaccataacttaagggccagcctggcctatttagtttatatcaggccaacaaggggtactgagtaagagtctctcaaaacaaacacaaaaatcaataaatttacagcaacaagcagaacaacaattaatgaatatataatgtatccaataaaaactgtaatagtatagataatagatgataaatagatgatcatcttatatcatagatacagattgatagatgaagataattcatctgacctgaaaactaaaacacaaaaaatcttttaataatatttaataattgtttttattattaaaatggtaaaataactaatcatttttcttctctcctaacccttttatatacctccaattcatgtcctttctttttaattattgttacacacatgcacacacacacacacacacacacatgcacgcatgcacacacgcatgtactcaacaaacattctaatacataaatacaacctgctcggtccttgtaacattacctgtatttatctgagtgatctcagggctttgggtattgggttgggaggctctttcctgaggaaggtcattcttccagtctcagcatcccttgtttgttgcgtagggtagagatcctctcccacttccatgttatcatgtccattagtgtcattgttcaagtcttatttcagcagccttggtgagacgtcatggatgtagtctttgtaacatttctaggaggtatgaccttttgtttacaaacatgttctgctggctctcagaaacttcaaccctttcttccaatgatacctgtgccatagatattgaattatgttgtagatgtatcagctgggactgagcactgtactctctcttgttctctgcatttcagttggttgtggaactgttggatttgtttttgttgtttgtctgttgttcgtttgtttgttctgatagtctctatctttggggatgcgatggatgaaaaccacatgtacctgggctaaaaaaacaaatacttatagtctaggtaaaagatttaaccagtggtcccaagaaattgttattttttgtttgtttgtttttcaatgtttgaagaaataaaagagaatctcaaatgttgtatacaaaatcaaaaacctaacaacttaacacatgaaaagtaagtggaatgaatctagttggcactgcattctcttagagagtgctgagtggagactttatgacccattagagaattgtagtagaagatactcataaatggtctttgtctcctcagtaggctttagccacagaacattggctcacttggctttttaaaacactctaaaaattatttcctgaaaactccctttagcactgcctaagaggtaatatctatttaggcttttgcctatagaccaaatgccttcttacatggctacttattactgactgctttcccgtgtgtgtgtgtgtgtgtgtgtgtgtgtgtgtgtgtgtgtgtgtgtgtgtgtattcattgtgactttgtatcagtacctgtctatacagctttgcctgttctcttacctgaatacataaattgagctgtgcaagaacctatttcaaacatgagaaaataaatcaatagaaaaattaaactaagcaataaaactagatgatgaagggtatttgtgggttgtagaggtacaatatatagacacagaattgatttcaaaagtttaggaagaatatttgacagagttactctggaaagacctgaccgtaggcctttcttgctgaattttccttaccaggatttggtatgtactcataatagctgaaaaccttagaaattaaagagcagacagagttggggagcaaaaggaatcttcacaggggtgtgtatggatccctcacctcatggttaagatgagcagaaagctggctggaggaaaaggaaatgaagctatcatactcaccttgctaggctcatctcaggactaaatatcaggttacaaatacctatcttcagttcaaatcaccttgctctgtaaaagagctactggtaattttgaaatgcactaagcagtgagagacatgcaagtcacatcaccattatcaactatggagaccctgacttggtagtgaacagttaggtttagattgtccttaagttgaaggagtcagagttggagggagggacagtatgtgtgcacatgtgtaagtggatagctagggctgaggagctgacacaaataaggactcgaccctaacatggaggaaaaaaaagtgtctacatggaggaaggggggagggtatcttgatagaggaaggtgggagggtttctcagagcccattaggatagggaactaagagaaagacattataaattcttgataatgccatataaatgattggttggagccagataccagttctccactcattatgtaaagtaagccatatttacactatactagcaaaaccagtgtttcttcctccttttgtgggtgggattcctggagtgccatgggtgtgtggacttgaaacaaacggtgaatttcatttatcttttctcaacttcaatttcatcaccttctttctgactaaagataattatgtttgttagtttaagaattttattattatttgagtgtctgcatgtgtgcatgtataaagggggcatgtatggatgtcagaggacagtttggggttggttttctccttccacctttacatggttctgggaatgcaacctgggttatcaaccttgttcactacctggctttgactactgtgctatcttatgagcccaaatttaatcttgtcattagacattgaaagtggtccttgaactgattgtaacttgagaagctgagacagactgggaagtgtctctggtattcatagcttccctctctcctctctccactgtcccctctcccttctgttgtcaccttctcctctgaatacttatgctcctcattccataaagactcatctgacatatttccaggccttggttgcttaacacagaggaggaggtgacagcaaagacagggaggagaaagagggaagggaagagaggagtataggtgggtgaaatcatctgtctatttattttctaactttagttgccagagaaggaatgatacagtaagcacacctaacatccagatgctggtctctgcataccttccttagctaatgaaagcaagctggtcttctcagggaaatgcacttgcacagggactgtgtccagtgaaactggagctttccattcggtgtcttgtacactgtgatgggcgctttctgtttcctcgtgcctaagagcctcaggcttaggtttctacaggaaggggtgactttacagcaacattggtttgctattgctttttaaatatcatacatagcattctaattcagtgtacacacacaagcatttatatgttagcatctaagaatcttagggtttttggggttttttaaagaatataactacagcatttctccactctcaaaaaaagtttctgtagcctctccttgctcttggtcaaatcaatggctttttctttttattaattcttatagcatgtacaaatgtataagtatgtacttgcatttccctaaatacagcctactctgtctgtataatgttacttgtatgtaccattttgggactgatcacttactattgaataaccaattaaggttactgttcactggaaaagactttctcccactctcagcattagcagctaagaatcttaggccatgtagacttttcaggggctgaactaaactaccttaggttagatactgtgcaaaactcttttcctggaggaaatggttttactgggtaccagttttattgttaaaagtacttttagaaatatgcttaagtcacattgcactaataggacactcatttcaatcaaatttttattttaatctttaggttatatataggatattatgttatttaaattttcccatatcaccatttagagctgtatattcatctacatataatcattctttttttttaaattacgtattttcctcaattacatttccaatgctatcccaaaagtcccccacaccctcttcccccccccactcccctacccaccattcccattttttttggccctggcgttcccctgtactggggcatataaagtttgcctgaccaatgggcctctctttccagtgatggctgactaggccatcttttgatacatatgcagctagagtcaagagctcttaaactaaaggaaacacatattgataagagtcacaatgttgaataattctctaccagaagcttggaaaggtgagatagccattttagacatacatcaccacattaggaggagaccaatattttaagagtgtaaatagaacatacaaacattaagattatatttgctttcttgaatctttcccagtatttttatttcccaattatgagattaaaaagaacttctcaaaagatattttctctataatcttaattttgtctaaactgttgtcaactcttcattgttgcccttttctgtgaggatactggtggaagaaagtggtattttaagtggcaaacattcacagataaccaacacgagaagaaacggaatcccttgtgagacttaacagtggaggatggtttagcagcagagatgcaattgaagacaaaaatcgctaagttagcttcagattctaaaattcgtatgatttttttaacgattacgttgatatatttttgcagatataaatggtggtaacctaaggtagtttagcccctgaaaatgtctacagaggatgctagatcccaagaccaacatggcagttcacaactgtctgtaacttcagccctagagtatccagtgccctctcctggtctccaagagcagcaagcacacatgcaatacaacacacagtgcatagatatacatgcaggcaaaatacccatatatataaaaataatgtttttggaagagacaaggaaaactccaggatggagtgtggctagcttttgtctttgaggtagcttaactctgaataaaccatcaactcttctgaaggcttgtccccggagagcttagttgtcagctttcagcatgcctgagtaccttcctgcctgcctgagctgctggctggtatcacactctttcctcctacagagaagaaacacgtatccttatcctaggcattggctgtgctcttatcttcagaaattaatcttatttaaggctccattattaattaattcagaggaagaaagctacagtaaggcacattaatatgactaatattaatattagagtttagactatagcctgggaaaactgaaagcatatttaagtgaagtcgagtcaggaaaaatagttttaataaagttacaggttttgtcacaatttacacaggcaaactgttaggcaccagcgttttcctttgctctgccaaagttcttaacattgtaaccttttttatttaaaatagagaggagtctttaaaaagtgaatagctaatagcttttaagtcctctatgaaaatatgaagaacactttgttgtggaaaaactgcatcaaagtgttcacaatggactcaaatgaggaatggtcacataatttattattaagacagtctcaccacagtgactgaactgggtggactgtaatgtttacatgggtagaggggtggcagtcagcttatatttaaatatgaacctgatataaacatatatctatctttttaaaatatatgaacgattgaatgaacgaatgatgaatggatatattctttttactcttttacaaaattattctgtatgcccagtgatgtatacatatcatcgtaatatgttggagacttgaaaaacagggatcgtttcttatgaaaagcatcaggaagtgatgagttctgattgtcggcttcacaggccagttgaatatttagtcacttaagtggcagaaggtccaccagcaaagttgtaactgacacattccttgagttcttcttagaggttcattcactcatttgacaaagtcataagaagtaaatagatgagtcaggtaccactttcatgttagaataattccaggcctcgaaggatctcttttggtgaggagaatttgtttagttttttcttgtcttgtttggttataagctcccagggggctagacgtccctacgggtgcagaaggcacaacagccagatgctgagagagaacacctcaaccacacacaagaaacagggagcagggtgtggggcaaggctatatggaaacccttaagaccactccagtgattactccttccaccaagtaccacatcctaaaagttcttaccaacaaaagacaaactcttcagatgcatgaccaagtggaggacatttctcactcaaatcacaacaggagatagaaagcatatacctgcaactgaaataatccaaataattctaaattcatgacacattcgatgaagaaaatggaattgtctgacacgatttcaagtaacttctctaagtgaagcgaattctaataggatttcagataaaccctgtctgaagtgatgtttgagctaagacattgatgagaaaagtatatgagcctgtagtaccaattgcctgaaaagcttaccaaagagaaggaacagtaaacaagggtcctgatatagaatcaaatgggttccaaggagcaatagagcttatcggagtttgtaagccatggcagcgagcatgtgtgctgctctatgtgtaaaggaaagcagtgctttaaggaatcatgattttctccttgcttttaaggattactcgggatgatccagagaatggatgacagtgtcaacgtgtgttaaggatgtccatgttgctaggaaggaagttgtgattttaaatgccaggcatgttggtagctaggactacatcaatggcagtagagctgagatgaatctatagggattgttgagagattaaatttgctctatgaagaacaggaaaattaaagtaggcagaattttgatctttgcaattaaatgaatgacttttccatttaatttggttgtttgatattatagagaaattgtctttgatattcatgaggaatctccctactgtttgcacaagatgaaaattgaaaatgaaggatttgaaaacctaagtatatagctcaatggtggcgtgttcacttagtgtgcacaaggtcctgggtcccatcatatagagggagggaggaactacgggaagaaggcagggaggccacagtgatcacagtgggaaagtcgaggtgacagaagcctgcagaggctggtcctatcgtgtgcacggtcaagaagcagagagtaatgctttgctcacttcatcttctctatttttctttcacaagccagaatcctataaccagagagtagccttgcccacaatttatctcccagattattcaagatcctgtcaaaagtgtagtcagcactggccttcacagcaggaataggcagggttgggttgatatagtagaacaatcattattcatgagaaaatagaattgtcttttcaaagttcaaaagttaattaggaattaatattccaaagacatacctacattatttttcagaattttatggattttaagactatttagtcttgtgtgtgtgtgtgtgtgtgtgtgtgtgtgtgtgtgtgtgtgtgtacaggttcgcattcaccacagcacatgtgaagggaccagagggcaactttgctgctacttttagatttttgaggcaaaagtatctcttgtttatggtgcatacaagtatacaaaagttttaggtcagttcttctatctctagctcccatcttacaattgtactattatcagtagagatgtgtgccattacatctggctttattgaaattgaactcgggttgtcagttctgcacaacaaatgcttttacctcatgacccttgtccttgtggccctgatttattgttataataaactattcccaaaattgaaaataatgctttcatatacaaatgtgttttattcaaatataatatcttcacctaagttttagtaaaaagtatattaaatacatctagaaattgtgaggggagttactacagaatcaattgtaatccattatggtgataaggagcaaaagatgtaatagttgagaacatggtgttcataaattgcttcaggcacacttattctctcatttccaatctaccacctaaaagctgttttggctgatgtgctttgcagtaaaaagtaaaaatagtattagaaagaattaagctttaacataaaaataataaaatatgaccattccattttattatctcttttacaaaatgatttaatgctaattttagaactcctgacatgtcagtgccctcttattcggataagaggaccagtgtttacttatagttttagtttcctctgctaatgagcattgttggtagtgtgggaactgatatcaattctctggagcttttttacatgccacatccattccatgctgcaattattagttccaatgttctgtatcttcactgtcgagcttcgtgtcaaccagagtagtataatcacggtggcccacgctagcgctcatatttttcaagtaattaaagagcaatatgaagacttgtattaccacaaaacccaaggagcaatttgtgtattggagagaattttaacatgcacgtcttcattacaatatcagcagcccacgtttaaattcagttcagttatgggaaagttgcgttaagtgactaatgagacagaagtaactttacaactgatgtagacacttatgacagagcagagatggcaaaattcgggaaggtacgatttctccttccatggtttgaagctgtcaatcaaaccagaatagttaatgtgaactcatattagatcccatagattaagtttatcatgattgatattctaatcccaattttattctaatcccattgaccattaagggcattatggtagggaaattactttggatttttcaggtatgttcagtgttattattaaaatcttaataagtagaaaggaaaggccaaagtcataaaagggacttgctgacagggacaaaacatggaatgataccatgctttgaagcagaagggagcttaagcctgggaattcaggtagactttggaggctcaaaaggccagaaaattgattgtcccccttggatctcagaaagccaaaccacaccagcatctgcatattagtcttattagacttgttttggaattcaccatgtcagaaataaggtaatgtttatgttcttttggccaaaaattataatttgtttctaaactatgcctaattaataaggaatggctttagtttatttgtttgtttggctgattggttggtttacttttcagaacagggtctcactgtgtagtcttgactgtcttagactcacgtgtctcactatgtagaccatgctgcctccaaacttacagagatccccctgcctctgcctcccaagtgctgggactaaaggtggatttctgacacctagaagtagaatcctactacaacgtctctgtgaacgtggaagttactttggaatggaacagtgagcaccgcttttatgaattttggggtcagagaggcaaaagcctagattgccttcagcaagctgtcagaatattggtgtctctgcaacaaggatcagaatgagatgaataaattgttattggaaaatgaagggaaagggatgcttgtttcagaatagaaatccaactgaattgtgtcatacagttatgtagaaagcaaaatttataaagctcgaacttaaatatgtggtaaggaggtttccaagaaatatcgaagatatgcttttgtcaaaaaacgagcatacacacacaatcacaaacacaaagaattgtgtgttagtacacatgctcacacacacacacacatatgtatatatgtatgtgtatatatatgtacatagaaaggcatatgtagtataaattattttaaaatttctattttacttttaattgtctgtctatgtgtctgtctttgtgtgtgtgtctgaatatgtgcctgtctatgtgtttgcgtgtttgtgcatgtgtttgtctgtcaatctgtgtgtgtctgtgtgtgagtgtgtgtctatcaatatttgtatgtatctgtgtgtgtgcatgtgtgtttgtgtatgagtagaggtccttgccaagtccagaaggtgctctcagatgccttggagctgaacttactgaccacttgatgtaagatctggtatgaggttaacctctgagccatcttaacaatccctgaggacttaatttttgttttacatttgtgaccgttgacctctgtgtatgcttggtgctctctgaaggcagacgagagcattgagtccactggaactatagttccaaatgattgtgatcttctgtgtgtgctgggaaccaaacctgggtcctctgcaagagtagcaagtgccctcaaccattggactattctttcaagcctctaaattcctgatcctattatttacacagttactgtggagatgcctgaatttagtcctttgtttaaaaaagcaaatgctaagtcggagaaaagttcgtgttttattcacagaaattaaaaaccgcttgttaggctgaatccctgccttaaagggattatatacttcatattgcaatattatagcaactctctctccctgccccgctttctatatttatcttattgtagggaaaagaaattaaaattccattcagtctcatcaagacacattttcagagtattacagagtactggtttatgattatcactctattatagacaaacaaaatattctttatcctctatcagtttagtttctgaaattatggattctatttggattttaatgaaatgtggattactttgaagattatctctgatttactaaatgacattagagtagaaagttaattgaatcttttttgaatgagcagtgaccactatgagttagtgattggagcaaaagatagtaaatgatgtattttgaattttccttatgtgtttaaaattatatcagaacagaaaatgacttgggtatgctccgttttagttttcttcacacaaatgatgtgacctcttttacatttgcaaaacacataaggaaattataatttatttttaaatatttttgagtttcatagtatgctatagggaagggttccatatactagaacacatgtaatatgtagtatgcttcaattttaaagaaagaggaaatatttccccaatatctgagtacttgtaagtttgtcaccatactctgaatccttcaactgcctgtttcacattttagaatcttgtttataatttttgcatttcctattctatatttcagagctcttgaactatttctacctttctataatctgtgaaaagtctacgttcgtgcttctcattgttcatggaaatgtagaaatgctcatgataaaatgatcctcctagcatttatacagccctgggagtggcagaagcttacagtgtgagtgctccttaccccttagggaaaataccagttacccttttagaaatacttagtctgtagatgttggctgtgcaggaatgcctccactgttgttgattcaaaaaccagtgtttgatttgctgcgtgcagctgctatttacaacacctgactttacatctgtgcccttaacactccagcctgcctttgcttgaggaaaccacccaagtcttgtacatttcctattggctgctgtttgccacaagaaaccccacctgggccacaatgacaaccgtcctctctgcattctggaccctgtagaagaagccactgtgtgtcatgcaattattgctcttctgacaagttcagtctcagggagagatggtttgaaatagctgtggttttgtgttactctacctgtgcagaagagattgtaggaaacaagaaatgtagtagaaatataaaatgggaaaagatcatatgaaacctgcaggatgagacatcatctcattaatttggactttctcttttcaagtaatatgggtagacctcactttattggtatgtgatttctttagcacagtttcacatcatcatggtgcaacagctatcccttgcgttctcctttgttcctcacttagtgccctacacacaatggatttacccacaatgatctggtcattcattcagaaagtattgcttatgtgctgtctgtcaggtactggaggtccaggaaatacactgtagaaaagaaggcatgatgtctgcatgaagagttagagtcagaactaatttcatctgcatctgttacaagttctgagatctggtctttctctgggtcacttcccaattcattgcagtaaatctcaaagaaatgtgttaccaaattttcataacatataactagttaatcaaaacccccatcagccacagatatttttatctattttaaatagagactgtctgtttgggctctgggtttgtaaaaccaagtcactaatttactattatgtaatagatagaaaattgtgtggctatacacacacacacacaacacacacacactttgcattcttggctgaactccacagaaaaaggaattcctggaatcagtactaaataatcacattatcacattatatgtgtctattttaaaatagttatactattttaatcctctaaactcctctaaaaagaactgcacaactatacatttgagtattgtcatgatacctttcaagatctggctatttttcaagttgttgttgctgctgttgttcttgtatgtgctagatatggatgtgtgtatatggacacacatgatatgtcatgtgtatacaaataagaggacagctttgtttggtcacttcttttctactacctttgcttgggtcctgaggatcaagttcagatcatcagttggtattacaagttgacgctcacctcagaggaccggcttgcttaatctccattccagagaatagctgctcataatgaagggtgtctgaaagtggccaaaatgaatgtttctgaagctatgggaaggatgaaagaataagagatagcagcttcagaatgtcccatgatatgtatatccattcagttgtcatgagaagcaacctaaatgactttgtgattacatcttttcctctcccaaagagaatcttctagtgatagagagagaattaaatctggaaatcaaatgaacagtcctgtttagagagaccaggaagaaaaatctgatgaatgcccaataaaagggaggagtatacagagccaatacagaaaaggagatgcacctcaccgcacaattacgataatgaattagggaagtcagacagacaagtcaagttgttagcaccttaacacaccagattgattggctcttcttttctggcctcctttataattttttaatctattttttcctcttattcattcagttctacatttatttcagaattctcttttgtgtggtatttgtgatattattgagtgtagctatcctcaggacaacaaacacaaatgtgatgtgtattatctccttcagacactcacatccttagtaccgtcccagattctgtcagtcttgccactttctttgggtgaaggttattatctcatttgtacatggttagtaattacgatttaactagtattcggttactattagacctataaaaattgctatcctctttctgtactcctctgctgttagtaacgacaaaccatttggtcagctctaagaccaagtatctgtctaaagtccttactcagaggctgaggaacagctaaatcagtcagtgcatgccacgcaaagatacgcatgaggacctgaacaactcacagagaagtgggtggcaggctccggtaatcccaacactgaggaggcagaagcaagagaaaccctggggtttcctggcttaggccaatgagaagctctgacctttccccaaaagaaaagatgcacagggcctgagaacacacacagttgtgtatcatctggtcaacacacacacacacacacacacacacatatacacgccatgcatatatcacacatacacccacatatatagagatatatagatataaccctggcagaaagcacagagggattcaagtaatgttttgctaaagggtcagttattctaaatagtcttagtgggctgtgtgctttgaatcccttatgcagtggaagatgactcctcagttttccttgacatgcacaaacactttcagcatgtctgcgcttgttttacttcctcatgcttgtgggcttcctccccaccaaccacactgctacgaaagtcctgcgttaccttagataccgccgtcacattgcagtttccactttgatttaaacatttcacttagctaacctatgagtatttagtaagatcatctacttcatataatccaattcacatttcagtcatcaaaccctgtacccacacttgggatcacctaatctgcttaattgaaattaaaaatgaaacaaaagctgccatttaagaattatgtgacttcagtggttttcttttttccttctgatgaccatttggctatcttatgggaaataccaattccatgaccttgaaccttgtttttaaatttactttacagtcctctggctacttactacatttcactatctgaatgaatgagtgaatgaatgaatgaatgaatgaatacaacttgtttgttaaatgtgcagctgtatctcaccagtgaagatttgactgattcttttactaaagggaagcctcagtaaacacttccatgactgaagtcctgcagatcagaactgggttatcagtttgaaagcagagcattcaatcacctctgaaatcccaaggggaaagttgctcctgcgctgtttggacctcttcccctctaataaagtgcattttcacactagaacctctgtaatcatgtatatggatttttctgtgatatttttattggaacagcccttcaaataacctaataatttaactctgaaggtgattcagatgggtattaatgaggtgcagcttttcctagaaagttagttgatgctcaagtcctttgtggaagggaaaatttctctttctgagaagatgggcatcatctaaggatttcacacactcctgcacacttactgcatcttggtccgacacagttttgtgttagttagatgttgacattacaaatctgaccttcaacaattgctaccacttcccctgattttatgctacagtatggtcagatgtattcaacagtagccagtatccaactgaaaggctacaccccaaactccaagtgcgaccctcctgttcccaaatcagtaggacttgtccactttgcttcctggggagtgcgggcaactggaaatgccgtagaaaaacttgagataagttcttttcctggctagtcctctatcttttgcctcctctacagcgtcttcacatcatcttcacatagctgctttctgccctagaagctcccatcgaataaactgattttggggtggacctgtgtgtccaaattgagttttgaaaaatacttatcctctaaagttccaataaatgttgccctcagccttcttggtctgcacaaggctggtgctccctcagtaactagatgtaaatgtatgcaaaattactggggtggggggtgctctgagttggatgcagtacacacccaggcaccaaattctcagcacagaaaaagatttcctaccctggaggagcaatcaggggagacagggagaggctgcaaagacagacagcaagtagcagcagcagcagcagcaccatcaataacattatctatcagtaagcaggcagcatgtgtattttgcaggagtaggtttttaagtagaaaaagtcttagctatggtgaattggtaatctctgattggacatattagccaaatagtgagttttggtttttggatcttggtatttagtctcagcaatgagtccataggtgaataagggaatgggccttgggggattgttttaggaatgtcatctaatggtttagcccaaaatcagtttagcttctgggaccaaaagcagttatgtgaagatgctggaaagtagaggaggcaaaagataagagaactagccaggaaaagaacttatctcaagtgtttctacggcatttccagttgcccccactctccctcgtagttaaatgaactgtattcggtatttccttaacttttctgtattttcttaaaatggaaagaccattgagtcatttataagtaacaagacaatattcagtgaaacatctctgggactgtccctcagtgccctggaaatatggctgatgaagccgttggtgtggtagccctttcaaacatgagggtgagcacgtttactgctccgaatttcataagcagctacatttgtgggaaacagccttatctttcacacagaacagaagccaggaggaggaaaaccacaagagactgaaaaacagcacagagaaactcaaacacaggagggtggggtagagcagaatgcagcaggcagtgactggaagggaagagtaaataggaattagaagtctgcccagagcaaagaaaagctctgggaagctcagggtctgcactgtctagaagctacaaattgggaacaggccttgatgtgagaacaggaaagaaaccctgctgtgggagctgtttttaccctggcctgtggaaggctaccacactgcaggtggtagcttttcccacctggaaaatactcaggaaaggtacattaaaataggacgtctgagtttacagagtctatgttactggacacaggacagggcattggacagttctgatatccttcctgtaggaaagggaaattggaagaaatgtgtctttgtcaagttccagagctacagatgggaaggaaggcaaaattgtgggcaagatcaagcagtatgggttagacagacatttgggattgggtagtttattagaaaatagggtcataattaattcagaaaccaggaattggcattttcattcctcgccataggctccccaccccaacagcaacactagaatgtcatcctggccattcattcttaccatacttctgaggttttatgttctttccatctgacatccatctccctatggacccctggtcctgactctacagcatttatatgctacttgggtagaatttgtagttttccaaacaaggtgtaaaatttcacagagtaatagtcagaaaacatacaggtgtgtgtgtgtgtgtgtgtgtgtgtgtgtgtgtgtgtgtgtgtgtgtgtgtgtgtgtgtggtgtgcgcgtgtgtgcatgtgcacttgcgagcgtgcgtgagcacatgccccagggtggaaaccaatgatcttggatcttccaagtcactgaggcctttgtaaatcacctgtccctgttgcataaactgaaatacagctgaacgagtaaaatacttgaattccaaactggaattccattatatctgtttcaactaccacatcctctctatcatttcaaatattgagtgtcaacaagcacttcttatttgatagctatgatgttatacacctgtaatcccagtatttgggagactgaggcaggttgatcaaaaggtcagtgttgtactggcttccataataagactctatctcaattttttttttctgctgaactgccctgattcggcaatatgcagcaattcttccaaacttaatattttattctgagttgtcattttcctatcattgcatttcatttacttctttgaatctaatcggtttaataactatttgtggggtaataaaaacatatgttatgagtctgccacacactgttcagattcccctaataacttccacgtgaaaggttaagtatgagactggcatatttttgagaactctttttgtggaagctcccttaggttaataaaaggcaaacctgatggggctttgcttttcaggggaaacccccagctgctacctgatcaacttcactcattctgtgaaagccaagcagccctctcctttctgtgtgagtcacacacaaggctttgatgagataaagggatccaaggaagcagtttcaaactgaccagatagaagggggaactaagaaacttctgattacacaatcacctaatgggaaaaccaagtttttaagcatgtactccagttgatttcctttattctgaccattgggagtcatttctggctgagctagaaacaccaccttttatgttacacagatagagtggggtttagtctttcaaaatgtgtgtgtgtgtgtgtgtgtgtctgtgtgtgtgtctgtgtgtctgtgtgtgtctgtgtggttcccttgatggtctatgttaatcctcaagtgccaattattattgccaactgaaagttgattcttgcatgacgcttgttgcctttgatcttctaacttgtcttgtagctctccctttttctgtaagtgctaactgctagagggtgagaatcccagcagagatttatctccagccagagacttgggttcccatttttcagtcttagcagcccactagtatggatgggatgaggaagaaagaccaaccctctaatatcaagacacagcaatttcagagctccctcagagatcacgtggaacctaggctccagcctagactacgtctttcctcagctgcttatccagtttatctcccttacctctctcccatccactggagagcttgccctttatgaattctatgacctgaaccctttcttgtcccaggctctgcttcaggggagcctagcctaagacagtagatccaatggcatggattccaacaggtttcatctgtgttcttctatcataggtttaaaacatttcttataacttcaaggattatgacttgaagttatttgcaattagtttttcccctgaatttccccactttcttgcatattttacttcaccacacgttttatttttaaggaccacaggcaattataagtcggatgcttaatgtagtttatgctcttcactttcccaacctccatgcatgcttttcagtggggcaataataaggtttttaagaataaagcacacatgaaatctgttttggttggtgttcaaatggtttgacatcagaactgtcagtaagggagccagccacttcagtatgtaataaatatgtgggctaccagcccttgtggcttcacccttcactgtgaaaggagatagagcaagcccagaggtgcttcggaaagttaattgaaataatatattagaagatcttggcatttatgaagcttttaaatgaatattcattcaacagaagaagctatggacgaaaatttaaaaggtcaggtttttcaggcacccagttttctgaagactctgaactctgaatgagggtgatatgtcatgtcatgtgatcatcacactgtatgacttacatcactgtccagcatccatattccttcactgaattagggagtggaatgtccatccagagaatacatcgctatgggcagtctagacagatgtcaagtagtagattctgcttttttaaggatgtaatacatacttaggccaggatgaaacgggtaaacacatcctggtcaccaaagagctgtaagtgttgccctgtgttccaggaaaactgtctgttagcagtaaagcagatgctgggtgtcaaagccatgggtggtcatgagagcggtcaagaattgcacactcccctgagcattctgatatgagggattgcaaaaagggttcattatcctttttgctatgctgagctgaaattatcaatagataattatgtgttggagtctgccttcacaggtaacatagcagatgaaactgtttatctaaaccagtgaaggaaatgggacactggttaaaattctgggtcaaggacagtgtcaagtaatgttgtgttctacttagcacagtgggaagtcagactatgagtaatgaccttaactgctgcacacaagcaaagaaacagcaagagaaagatcattgtgtaagaaccactaataaaaagagcatactcatggtatttcatgttcatgtaaaattatgtgaccttgtcgagaatacattgggtctcagaaatttcttacttccttttggtgatgtgataactgtggtgagtaacaatcacttccaggtactttgatatacagtcagtggtattgaaagcaaacccaaggattgaggataatccacctcattttaaagatgagtcttgaaaggatatagtataccttctctagatcattcagttgtttttattttgcttcaggtttttccttcctttctggacacattttttttccatattttacatagggtgagaatcttacccttagtgcaagtgtaattattttggcaattgtgaaaatagctattatgaccagaccatgttattttattggctgtgaaggaacgatcacttgatgcacaaaccaactgggaaagtgaagtctagaactaggtgcaagagtctgacacattctacaagaagaattgatatgaatgatatgaatgagtagggctgatgagaggttctgcaagcaataaaggcagttaggaacagtgttagataaatacacctgccttcgtctatctgaaacagaagttggtggtttgaggaggagtatgtatgtgcatgtttatatatgttcatgtgtgcctcctccgtgtgtgaaaccagagtttgacatcaagcatattcctcaattgttctccacattgattgtgtgtgtgtgtgtgtgtgtgtgtgcgtattttaattttaatcttattcatttatttttatgagtagcagggaggttttatgtacatatatacttgctgtgccctgctgtgcttgtgtggaggtcagagcacaactctcaggagtcacttctctcccatatcagtatgaccagagaggacgaaatccacatcatgtagctccatgtccaggggtgcctacagccacaagcaggggtagaggatggaaatttatgcctgcataaagtcttgggaggggattacatctggctttgatcccttttgctgcctttggatttctcagtccctgaactataatcaggacatgatcttatttcagccaccagacttgcaatagcatcctgtggctgcgggaaactggtgtgcacaaagaaaattactttatgactatttctcttagtgtttagtcagcaccttatacagagggaataaaactagactcttctaatctaaaaaacattgattttcatctttatttaaatgtgtttacttattctttttccataagttgggacaatttagcaaaagatttatgtgttgcctcctttgaggctcaagttaaataactttgatataacagaagttggagaaaccaatctgtctcaatcagaactttggaaatatgatttcatacaaactaatgaaggaaagaaagcctggccactggggacgagagtggcttatgtaaatttgtgtcatcagccaagcacatacatgctaaatgcaaaaggatgtttcaacctttgttcaggatccagaaatagcttgaaataatctcatttgaaaagaccagaaaatgtttttggcttgcgtattacatgtgttatgtcaacttgacccaagctagggtcaacagcggaaggagcaccatcagatccagctctaggcaagcctgtagggcattttcctaattagtgatcctgaggaaggacccatccatccttttgtgagggtgggatagcacctctgggttagtggttgctataagaaagcaggctgagtaagccaggaggagcaagccagtaagcacaactccttcatggcacctgcctccagcttccaagcaagtttgagttcctctcaatgctttcctcaatagactgtgactctggatatgtaagccaaattccaaagccttttccatcccatgttgcttttggtcatgggtttcatcatggaaatagaatccgtggctgtcatggctcagtaaaatttactgcctttgtgttgaagatacacatttattacactgtaaaataaagtagactggtgtgaccttggctggcaatgcaaaatctgcagcttccagtttatcccctcttatctttctgtagccacttgtaatgaatgcaaaactatgccatgaatgttacactccagtgagaaatgcaggatgctatcagagactgtgtaaaattcagtctggttttgcatgccaagaaaaatattctcattaattttcattcttgatgctaaatttccatttattgttcgtgtaaacatgctaccaacagccatcaatctttcccctcttcttgaaaatgttccggtaaacaagagatttcctaagagcctgatttgcagatgccatagcaaccaacgttctgatactgcgaacatcatctgttacatctgttacacggccggtgcttggggtcatgcgcttatagtagactcagttactaaatacgtactgaagcagtaggacaaggcgtgtccatccggatgtctgctgagctcatacaagaaatcgtgtgtcgtgtgcacattcaggctatatccccaagggataatttactgctatgactgagaatactgaagtggctttgaactacacgagtaggttagaagcctgtttagagaataaaagaaatacatgtaaagactaagtatgagttttctgaatgtcctagaaatgtcctctacttaagttaaaaataataagagataaaaatagtctttatttttttaaaaaaacctcttaaaggaaaagtgattgcctatttctttgttttgtcatattttttaaaatacattcttgcagaactttaatggaactctacaactaaaaatgagatgtgggaagaacagattcggtgtggaagaatgtgaaatggaggatcagggggtagaaatgtccattcgagactgagctgagcgacagacagcagagagagtaagagggacagaggctatggacttagctttcagagaagtttgttgtcaaaggatttcgtttcagaaatgtatacactcaaaaatcagaagtcagtgaacatgtagcaagactttcttttataaaatcggaagtatcgtgggctgctctctgttgctttaactgaatagtgcagatcaaataacttaacgtgcttgttctgtgttgattcatctcatcgatctagaagtccatcatcaaaaagcggatgatgctgactgtctcttgctagttggttctctggggtgtcccaaggtgttcagggaataatgtagtgagacatccttgttagttactggggtctcccttcctattataaagccatgaatgtatttatagggccatgtccacatggcctcttctcaacctaatgacctcataaaactccatctaaaaatacatctgatgcagttttcactacacttgtattacatcatagtgggcactaagcttcaaccagactgagtggggatgctcagacatatcagatagagtgaggtcctatattttcatctgaacagcagggctgtttcccacactcatgtgtagggcacagatattctcaggttagggacagtgatcttaaataatagtcccatgcatggctttccattcctacctaaccattaatatggtcctgttcacaagtggctccatttacttagatgtacagaacaaaacgatccggtgttattactgtgctgtaccgcctcaggttctctgaaaattcactggtaaattttagtaatttttaaattgtggttaacattagataccccagtcaaataatacattttccacttgatattgaacttacatatcttttggtagtgacagatttgctatagaaaaactgtaccttttttttttttttttttttagttttaaaaaactacatttgatttggtacgtggcagtatagtttacacatcaaataacacaatcatcgaataatttagcatagttttgaacagaaggaaaagggggaaagattcaggctgcagaactcctcccaacataatttttaagcccctttttttaagtagcaaatatatctactatttagtcctgtctgactcctgttatgctggtaggcaaggaattaaaaaaaaaaaaaaaaaaaaaaacaacccagctttaaaaattctgcatttatttgtttttattagttctttgagagtttcattcatgttttaaatgtattcacgtttcttcctccaactctaccaaggtctacccaccttccctattcatcaaactctgttctccaaaaaaaaaaaatacttttttttcttaaaggtatccctaagaaataagattcataataagcattttaaagatcaaaaacttttccagattcacaaaaaactgatagcaggcccctttttccccaccaatgtcccttttcggtcatcagaccaaagattcaaactgtaaatacagctgtttaaggtcctattctacccagacagaaaagtgtagcaatatataacgtgaaaataaatgttaggagtgtgtattttgggccagttaatatatcctatgatttttccctactgtagaagctttctttttttaaatttagacttctatgaagttctctttatggatgctccttcctatttcgagctctgccttcccatggctcctctgagaatcttgagcactctggtcagaagccagcagatatcccctaaaacaaatgtgtcagttttccatctctctttcacgttgcaaaacaaagctctcgaaattagtctgaacaggtgagagggtgcgccagagaacctgacagcttctggaacaggcagaagcacagaggcgctgaggcagcaccctttgtgggccggggacagccagccaccgtctggaccggaggacaggtgcccgcccggctggggaggcggcctaagccacagcagcagcggtcgccatcttggtccgagacccgccgaacttaggaaattagtctgaacaggtgagagggtgcgccagagaacctgacagcttctggaacaggcggaagcacagaggcgctgaggcagcaccctgtgtgggccggggacagccggccaccttccggaccggaggacaggtgtccgcccggctggggaggcggcctaagccacagcagcagcggtcgccatcttggtcccgggactccaaggaacttaggaatttagtctgcttaggtgagagtctgtaccacctgggaactgccaaagcaacacagtatctgagaaaggtcctgttttgggccttcttcttcggccaggaggaggtccaaatacaagatatctgcgcaccttccctgtaagagagcttgccagcagagagtgctctgagcactgaaactcagaggagagaatctgtctcccaggtctgctgatagacggtaacagaatcaccagaagaacaatctctaaacagagtcaactataactactaactccagagattaccagatggcgaaaggtaaacggaggaatcttactaacaggaaccaagaccactcaccatcaccagaacccagcacacccacttcgcccagtccagggaaccccaacacacctgagaacctagacctagatttaaaagcatatctcatgatgatggtagaggacatcaagaaggactttaataaatcacttaaagaaatacaggagaacactgctaaagagttacaagtccttaaagaaaaacaggaaaacacaatcaaacaggtagaagtccttacagaaaaagaggaaaaaacatacaaacaggtgatggaaatgaacaaaaccatactagacctaaaaagggaagtagacacaataaagaaaactcaaagcgaggcaacactagagatagaaaccctaggaaagaaatctggaacaatagatttgagcattagcaacagaatacaagagatggaagagagaatctcaggtgcagaagattccatagagaacatcggcacaacaatcaaagaaaatggaaaatgcaaaaagatcctaactcaaaatatccaggaaatccaggacacaataagaagaccaaacgtacggataataggagtggatgagaatgaagattttcaactcaaaggtccagcaaacatcttcaacaaaattattgaagaaaacttcccaaatctaaagaatgagatgcatatgaacatacaagaagcctacagaactccaaatagactggaccagaaaagaaattcctcccgacacataataatcagaacatcaaatgcactaaataaagatagaatactaaaagcagtaagggaaaaaggtcaagtaacatataaaggcaagcctatcagaattacaccagatttttcaccagagactatgaaagccagaagagcctggacagatgttatacagacactaagagaacacaaactgcagcccaggctactatacccagccaaactctcaattatcatagagggagaaaccaaattattccacgacaaaaccaaattcacgcattatctctccacgaatccagcccttcaaaggataataacagaaaaaaaccaatacaagaacgggaacaacgccctagaaaaaacaagaaggtaatccctcaacaaacctaaaagaagacagccacaagaacagaatgccacctttaacaactaaaataacaggaagcaacaattacttttccttaatatctcttaacatcaatggtctcaactcgccaataaaaagacatagactaacaaactggctacacaaacaagacccaacattttgctgcttacaggaaactcatctcagagaaaaagatagacactacctcagaatgaaaggctggaaaacaattttccaagcaaatggtatgaagaaacaagcaggagtagccatcctaatatctgataagattgacttccaacccaaagtcatcaaaaaagacaaggagggacacttcattctcatcaaaggtaaaatcctccaagaggaactctcaattctgaatatctatgctccaaatacaagagcagccacattcactaaagaaactttagtaaagctcaaagcacacattgcgcctcacacaataatagtgggagacttcaacacaccactttcaccaatggacagatcatggaaacagaaactaaacagggacacactgaaactaacagaagtgatgaaacaaatggatctgacagatatctacagaacattttatcctaaaacaaaaggatataccttcttctcagcacctcatggtaccttctccaaaattgaccacataataggtcacaaatcaggcctcaacagattcaaaaatattgaaattgtcccatgtatcctatcagatcaccatgcactaaggctgatcttcaataacaaaataaataacagaaagccaacattcacatggaaactgaacaacactcttctcaatgataccttggtcaaggaaggaataaagaaagaaattaaagactttttagagtttaatgaaaatgaagccacaacgtacccaaacctttgggacacaatgaaagcatttctaagagggaaactcatagctatgagtgccttcaagaaaaaacgggagagagcacatactagcagcttgacaacacatctaaaagctctagaaaaaaaggaagcaaattcacccaagaggagtagacggcaggaaataatcaaactcaggggtgaaatcaaccaagtggaaacaagaagaactattcaaagaattaaccaaacgaggagttggttctttgagaaaatcaacaagatagataaacccttagctagactcactaaagggcacagggacaaaatcctaattaacaggatcagaactgaaaagggagacataacaacagatcctgaagaaatccaaaacaccatcagatccttctacaaaaggctatactcaacaaagctggaaaacctggacggaatggacaaatttctggacagataccaggtaccaaagttgaatcaggatcaagttgaccttctaaacagtcccatatcccctaaagaaatagaagcagttattaatagtctcccagccaaaaaaagcccaggaccagacgggtttagtgcagagttctatcagaccttcaaagaagatctaactccagttctgcacaaactttttcacaagatagaagtagaaggtattctacccaactcattttatgaagccactattactctgatacctaaaccacagaaagatccaacaaagatagagaacttcagaccaatttctcttatgaacatcgatgcaaaaattcttaataaaattctcgctaaccgaatccaagaacacattaaagcaatcatccatcctgaccaagtaggttttattccagggatgcagggatggtttaatatacgaaaatccatcaatgtaatccattatataaacaaactcaaagacaaaaaccacatgatcatctcgttagatgcagaaaaagcatttgacaagattcaacacccattcatgataaaagttctggaaagatcaggaattcaaggccaatacctaaacatgataaaagcaatctacagcaaaccagtagccaacatcaaagtaaatggagagaagctggaagcaatcccactaaaatcagggactagacaaggctgcccactttctccctaccttttcaacatagtacttgaagtattagccagagcaattcgacaacaaaaggagatcaaggggatacaaattggaaaagaggaagtcaaaatatcactttttgcagatgatatgatagtatatataagtgaccctaaaaattccaacagagaactcctaaacctgataaacagcttcggtgaagtagctggatataaaattaactcaaacaagtcaatggcctttctctacacaaagaataaacaggctgagaaagaaattagggaaacaacacccttctcaatagccacaaataatataaaannnnnnnnnnnnnnnnnnnnnnnnnnnnnnnnnnnnnnnnnnnnnnnnnnnnnnnnnnnnnnnnnnnnnnnnnnnnnnnnnnnnnnnnnnnnnnnnnnnnnnnnnnnnnnnnnnnnnnnnnnnnnnnnnnnnnnnnnnnnnnnnnnnnnnnnnnnnnnnnnnnnnnnnnnnnnnnnnnnnnnnnnnnnnnnnnnnnnnnnnnnnnnnnnnnnnnnnnnnnnnnnnnnnnnnnnnnnnnnnnnnnnnnnnnnnnnnnnnnnnnnnnnnnnnnnnnnnnnnnnnnnnnnnnnnnnnnnnnnnnnnnnnnnnnnnnnnnnnnnnnnnnnnnnnnnnnnnnnnnnnnnnnnnnnnnnnnnnnnnnnnnnnnnnnnnnnnnnnnnnnnnnnnnnnnnnnnnnnnnnnnnnnnnnnnnnnnnnnnnnnnnnnnnnnnnnnnnnnnnnnnnnnnnnnnnnnnnnnnnnnnnnnnnnnnnnnnnnnnnnnnnnnnnnnnnnnnnnnnnnnnnnnnnnnnnnnnnnnnnnnnnnnnnnnnnnnnnnnnnnnnnnnnnnnnnnnnnnnnnnnnnnnnnnnnnnnnnnnnnnnnnnnnnnnnnnnnnnnnnnnnnnnnnnnnnnnnnnnnnnnnnnnnnnnnnnnnnnnnnnnnnnnnnnnnnnnnnnnnnnnnnnnnnnnnnnnnnnnnnnnnnnnnnnnnnnnnnnnnnnnnnnnnnnnnnnnnnnnnnnnnnnnnnnnnnnnnnnnnnnnnnnnnnnnnnnnnnnnnnnnnnnnnnnnnnnnnnnnnnnnnnnnnnnnnnnnnnnnnnnnnnnnnnnnnnnnnnnnnnnnnnnnnnnnnnnnnnnnnnnnnnnnnnnnnnnnnnnnnnnnnnnnnnnnnnnnnnnnnnnnnnnnnnnnnnnnnnnnnnnnnnnnnnnnnnnnnnnnnnnnnnnnnnnnnnnnnnnnnnnnnnnnnnnnnnnnnnnnnnnnnnnnnnnnnnnnnnnnnnnnnnnnnnnnnnnnnnnnnnnnnnnnnnnnnnnnnnnnnnnnnnnnnnnnnnnnnnnnnnnnnnnnnnnnnnnnnnnnnnnnnnnnnnnnnnnnnnnnnnnnnnnnnnnnnnnnnnnnnnnnnnnnnnnnnnnnnnnnnnnnnnnnnnnnnnnnnnnnnnnnnnnnnnnnnnnnnnnnnnnnnnnnnnnnnnnnnnnnnnnnnnnnnnnnnnnnnnnnnnnnnnnnnnnnnnnnnnnnnnnnnnnnnnnnnnnnnnnnnnnnnnnnnnnnnnnnnnnnnnnnnnnnnnnnnnnnnnnnnnnnnnnnnnnnnnnnnnnnnnnnnnnnnnnnnnnnnnnnnnnnnnnnnnnnnnnnnnnnnnnnnnnnnnnnnnnnnnnnnnnnnnnnnnnnnnnnnnnnnnnnnnnnnnnnnnnnnnnnnnnnnnnnnnnnnnnnnnnnnnnnnnnnnnnnnnnnnnnnnnnnnnnnnnnnnnnnnnnnnnnnnnnnnnnnnnnnnnnnnnnnnnnnnnnnnnnnnnnnnnnnnnnnnnnnnnnnnnnnnnnnnnnnnnnnnnnnnnnnnnnnnnnnnnnnnnnnnnnnnnnnnnnnnnnnnnnnnnnnnnnnnnnnnnnnnnnnnnnnnnnnnnnnnnnnnnnnnnnnnnnnnnnnnnnnnnnnnnnnnnnnnnnnnnnnnnnnnnnnnnnnnnnnnnnnnnnnnnnnnnnnnnnnnnnnnnnnnnnnnnnnnnnnnnnnnnnnnnnnnnnnnnnnnnnnnnnnnnnnnnnnnnnnnnnnnnnnnnnnnnnnnnnnnnnnnnnnnnnnnnnnnnnnnnnnnnnnnnnnnnnnnnnnnnnnnnnnnnnnnnnnnnnnnnnnnnnnnnnnnnnnnnnnnnnnnnnnnnnnnnnnnnnnnnnnnnnnnnnnnnnnnnnnnnnnnnnnnnnnnnnnnnnnnnnnnnnnnnnnnnnnnnnnnnnnnnnnnnnnnnnnnnnnnnnnnnnnnnnnnnnnnnnnnnnnnnnnnnnnnnnnnnnnnnnnnnnnnnnnnnnnnnnnnnnnnnnnnnnnnnnnnnnnnnnnnnnnnnnnnnnnnnnnnnnnnnnnnnnnnnnnnnnnnnnnnnnnnnnnnnnnnnnnnnnnnnnnnnnnnnnnnnnnnnnnnnnnnnnnnnnnnnnnnnnnnnnnnnnngaaatgtaaatgagctaaatacctaataaaaaatggaaaaaaaaaaaaaaaaaaaaaaagattagagtgaaatgcaagataaggctagacagctacgagacaggcacaaacgctacccctttgcagtattacaatatgtataagaaggggtgcaaggtaaagaaaaaaaaaaaaaaaaacaaagctcccacattccggtgagatgtctcctggcctcccatctgtggtcaagtttgaggatgctttgtgaacagagtgcagtgagacataacaagggagctcaaacaccagggcagtttcctcttccaatgagggtatgttgtggttagcacccttcctaacttccttgtcatttaaggatactatcctgggttatttgctgttggtgtgataaagggcatgaccaaaacaactcagagagaaaagggcttatttcatctaacatgtcccaattaccgatcaccagggaaaagtcagtactggagctgaagcagagatcatggaggaaaacccacactaccttccctctcacgacttgcttagttccttttctgctaccacccaagaccacctgctcacggtggcaccagcatagtagtttgagcgctccattagtgatcattatttagaactagaaaatattccagacacttgcctacaggttgttcccttgagggcatgttttacaattaaagtttcctctttccagttgattcctcctgtcaagctgacaaacaaacaaacaaacaaacaaactaaccattccaaattctttaaagaagtaaaaatatttttcctatgcatataacacaatccaaagctaaataggatattacacctgtcagcatgtggcagatctcaccagtttgtaatctgaggcccacatattcttttagtatataagcatgtccattgttttgcaaaggaatcttgggttcagtttacacgtctaaaacatcagcattcccaagagaactgtcactcataattcattttgctcttaggagttggactgaattcctcctcctggtgagcataatggttagaatgttgtgagttctttttatatatatatatatttttttattacgtattttcctcaattacattttcaatgctatcccaaaagtcccctacaccactcccctacccacccattcctttttttttttttttttttttttagttcttaccaccatgactgtagtgtggaaatcacaagggtaacaaaagctttcaggttagagcaaggagattgtctgagtctctcactacacatttgctggtattttcagtagacaaaagactagcttatccatacacatcacagattcactattacaggagagagacatgaaacaaaagaaaaagaaattgaaggaactttaaaaaatacattctattctttcagaactgaaggaattgttatttcttgcaaaagaagagtggaggctagatctccctgaatcttaactgcagtttcaaatggagtcaattagaactaaataatcttaaacattttacaataattataaaaacctgtttatggatctattctcatattctattgggttttcagatagtagtccttgcttcaactcttctctgcctcttcccactgttccttcccactcactgatgatcagaaaagttgttcagtatttttgaagcaggaataaaaatgtggggaaatgggattgagttatttttattttcattggttagagtatttggtttaggagtatacctatgtaactaaggctagaaaggatctaaatgtgaatctactggggatacagcaagtgaagagatatggcagttagaataagaaattcccctgtatattcaacccctggttgatcctcagctggtagtaatgtttgggaaggtctcaaggcgtcatggccatgctagaagatacagaaaggggtctttgtggtttgaaagtctcctatcatttgagtacactttctctcatcccacccttctctctgcttctgtccagctgctatgcctgctacttgataacatgcctccctaccagaatggactgtatccttctgaaagcataagcccaaataaactctttctactataagttgccctgactgtgctgttttaccatagcaagtaaaaagtaaccaaaacaagagactttctatagaaaacatgtgctgtctcgtatccaaaaatgtgcaaacagataacagggtatgagaactgtgtacaacatcttctcatagagaagaggcctgatgtggtggttggaacatgcttagctcagggagtagcactattgtatggccttgttgagtaggtgtgtcactgagggctggatgccaggtttctcccaacagcagggggtcagatgaagatgtagaactctctgctactcctgaaccatggattctgtcatgttcctgccttgatgatactggactgatcctctgaacctctaagccagtcccaattaaatgttgtccttagaacagttgctttggtcatggtatctgttcacagcaccaaatccctaactaagaaaaccaatgacgtctgggagaggcagaattatacgaaatccagtgggcaaagaggagctgccatgtgtcatgttgagcttatcttcagagaaccctgggcaagtcaaccagtcactctggagtgttgtgacctatcagtccaagcattaggtaaaagaagtctgcgagcagttggttcaagagtggggaactgaaaaacaattagaatgaaggtctaaaaaaaaaaaaaaaaaaacaagagaaaataaagtcaattgtttgtagacctatgacaaacatgtatgaacacaaaagtaagcagctaatagtttatgtgacttaattgcaaagaccccaaaaagcaacgctcctatagtgaagacatagaaaaacccaattcaggcataaagaagaaaggggtatggcccagagtactaggaagctaatgatcttgcttctgggagcttatttatacaaactgctaaagcttttggaattgtaggcaaaaggttaacagcctatttgcatttatgctataaagctgtatgttccaataggtggcaaattagaccaaactgcaatataaaagtgtgggatttagagcgcatgtatttctggaatctgtgttttgctggagaatagcaatgctggtctgtgccattaaagaagacagatgtggaaaacactccagatatttttttcagttgcaaatacattttattggatattttctttatttatgtttctaatgttataccctctcccagttcccccacctcccagaaacccctgcttctgtgagagtgttcctccacccacccactcctgccttcccacccttgattcccctacactggggcatctatcaagccttcacaagaccaaggatctctcctcccattgacacctgacaaaaccatcctctactacatatttagctggagccatgggtactccttggttggtagcttagcccctgagagttatgggggatctggttggttgatattattgctctctctaaggggttgcaaaccccttcagcaccttcagtcctttgtctaactcctctattgtcacacacacacacacacaatgcccaccctcctcgtgcttaatccagtggttggctgtgagcatttgcctctgtatttgcaaggctttggcaggacctctcaggagacagctatattaggctcctgtcagcaagaatttcttgacatccacaatagtgttcaggtttggtgactatatatgagatgaatcaccaggtgggacagtcactggatggcttttccttcagtctctgctctacaatttgtctccatatttactcctgtgagtattttgttttccttctaagaaggaccgaagcatccatactttggtcttcctttttcttgagcttcatgtggactgtgaattgtatcttgggtattctgagcttctgagctaatatccacttatcagtgagtgcatagcatgtgtattcttttgtgattgggctacctcactcaggacaatattttatagttgcatccatttgcctaagaatttcatgtattcttctattttaatagctgagtcatattcctttgtgtaaatgtaccacattttctgtatccactcctctgtaaagggacatctgggttctttccagcttctggctattataaataaggctgctatgaacatagtggagcatatgtccttattacatgttggggcatcttctgggtacattcccaggagtggtattgttgggtcctcagtactatgtccaaatttctgaagaaccaccacagtgatttccagagtggttgtaccagcttgcaatcccaccagcaatggaggagtgtttttctttctccacatccatgccagcatcttctgtccctgaattttttatattagccattctgactggtgtgaggtggaatctcagggttgttttgatttgcatttatttccctgatgactaaggatgttgaacatttctttaggtgcttcttagccattcaatattcctcagttgaaaatttttgtttggctctgtaccctgttttttcatagggttatttgattctctggagtctaacttcttgagttctctgtatatattggatattagccctctatcagatgtaacattggtaaagatcttttcccagtctattggttgctgttttgtcctattgatagcgttctttgccttacagaagcttacacaaggaagaaatcaaaatatcagtatttgcagatgctatgatcatatacttaagtgacaccaaaagttctacaagagaactcctaaagcaaataaacaacttcaacaaagtagctggatataaaattaactcaaacacatcagtagccttgctctactcaaagaagaaataggctgagcaagaaattaggaaaaagacaccctttacaatactcacaaatcatataaaataccttggtgtgactctaaccaagcaagtgaaagatctgtatgacaggaacctcaagtctctgaagaaagaaatcaaagaagatctcagaagccagaaagatctctcatgctcatggattggcaggattaatatagtaaaaatggccgtcttgccaaaagcaatctacagattcaatgcaatccccatcaaaattccaaatcaattcttcatagagtcagaaagagcaatttgcaaattcatttggaataacaaaaaaaaaaacaggatatcaaaaactattctcaaaaataaaagaacttatgggggaatcaccatccctgacatcaaggtgtattacaaagcaattgtgatgattaaaaaaaaaaatctgtatggtattggtaccgtgactgacgatagagcaatggaatagaactgaagacccagaaatgaacccacacacacacctatggtcacttgatatttgacaaaggagctaaaaccatccagtggaaaaaagagagcatttttaacaaatcatgctggttcaactggcggttagcatgtagaaaaatgcaaatctacccattcttatctccttgtacagagctcaaatccaagtggatcaaggacctgcacataaaaccagatacactgaaacttacagaggagaaaatggggaagagcccagaacacatgagcacaggggaaattttcttgaacagaacaccaatggcttgtgctgtaagatcaagaatccacaaatgggacctcataaaatcgcaaagcttctctaaggcaaaaccacaccagattcttataaggtttcttcaacgttgttctatttgttccctggagtaggtataaaagaattttagaaatccattccgtatgtaaagaaacaaatattcaaatatgtttatgttcatatatatatatatgtgtgtgtgtgtgtgtgtgtgtgtgtgtgtgtgtgtgtgtataacacatacacatatatatatgtaatctcaagttttaatattagggaggcttcagtagtccttgcttgttctttttaagactctgccttatccagactagcttgatcatgtagaccaagtggtatccaggcaagacagaaaaatatcaagatcttgtttagagaaaacaaaagacaaatcaaaccactcaactctaggtccaggacataaggagctcagagtagagcccacgcccagcatctatgaagtcctggactcctactcttgatctctcagcactgccaaacattcttaaagcatcaagcataacactctaccactgttgggttgtaatatatatcatatgtgatatagtgtggtggtgtctatgtatgtgagtgtgtaatatcaccaacaaagtccaagaaatcagaagaccagggtaatgaagtcttcatgttagagaaggatacctttcttatatcaaaagtgtcttgttcagactaggagaaagctttgagtcaaactgggtttcttatctgcaagtggatcactgtatttgatataagtacatttaccatataatatataagaatatatattggatataagtataaatgtgatattttaacaactagaagttggtgattgggaaattttggatgatcagaaccattttaaaacgtgaatccagaaccagcaaggaacttcagctgggtttagtccctttcccaattacacacatacacacacacacacacacacacacacacacacacacagagagagagagagagagagagagagagagagagagagagagagagagagagagaaacgtatgcctcttatttacctattcacttgaggccaaatgacattttaggattaaaaaccaatctcaaattctaaaacatatattaataatttaaactttatactaaattatcttggaacagctgtgactcgaaataatttttttaaggctggttcttccatcccagatcagggcagtctctaatttagtaaataaacacttttgaaaattgcagtgcaacctctattaatgtgatttaaaccctgttgtgtgttctcctgagatatgccagattaatgaattatctaagccttggtggaaaatgacctgttcaaaatgaaaataaaattcataactaaaaggagccaaaatagcaagcactcataatcctttagctaacaagtaagagcagtagaaataggtcaaagggtaggtcctacttattattttagatcatatttcacccttatttttgaagattgttaaagagtttccttgacttctatttgttttcctaataatattcaaattaaatttttttgttgttgttttaattttccttcttaggctttgaatggcatgtttagatgactggcccagttctggtattctgagtttgtgccaacaaaaatgtcaagtgcatttgccttttaattacatgcagtgcctacattttaatattccagagttttccctgaggaagagacttttctgatcctgccatttgtgggaggggaaaaaaaataccagtgacattatcagagctgtttttccctagtgtctcctgctacccatgtttatcactttacaaacgttcacttgaaagttatatttagttgtttgtggccttcttcactgtaaatgttctgtgtggataggatatagcccagcattttactttcacttccctctcttgtttcccagtgatcatcagccaccctgctcgagaggcatcgcctacttccatgtctcaacactaggataagtgtttagaaggtgtaagcccttattactgacatattccttgcccatgctctctttactataaatatagcctcgttcattagccctccaacagtacagaactatagtatttggcatccccaaagcgtgaaagcagaattgttattgtctcatttgttttgttacttgaggtaagaagatcagtttttgtcaagtaagtgactccaatgctctaagcttccttcaatgccaaatgcacacatgcaacaaagcagagacacaaagaggaggctccatcatctaaccccatatcaccttcttctgacccgtcttccctcctatgcagaaatgacatggtcactgagtggcctctgctgaattatctattagtgccagggccaagaaggtggcaaagtcagtaaagtgttcaccacatatacctgaattcaggtgcctgtcttatgtgtgaaaagctaagctcagcaatgaactcatcatgccatctctggtatcttagagttctgttgcagtgaagaaacatcatgaccatggcaactctgatacaggaaagtgaataaataactgggggcttgcttgtagtttgggaggttagtccactatcattatggagtggagcatggtggcatgcatgttgttagagagtttacatataggtccaagagcagcagcagcaacaatgtggggggaggaggggggagagaaactgggcctgagctcactcctagtaacagaactcctttggcaaggacacacctcccaatctttctaatcctttcaaacagctctgttcccaggtggctaggctttagaatataatagcctatggggatcattgttattcaaatccaccatttccatccaggtaaagacaataggataagttgggcttgttagccaggaccctagccaaaagcaagagcttcaagttcagtgtgagaccacatcttgcaaaaataagacatagagtgagtaaaacatcccatgtcagggacaaacacatacacttattttgtaccaaaagatactggtttacttgcacatatatgcagtaaaatcttattcatgcgttataggaaaattatgacatggtgtttgaggtgagagaataaggatatataaagtcttggataaaccaaagaacttgattaaaatccacaatctgggggctaggagtatggctcagtagtagaatacttgcccaccatacacaagtacctgtgtttgaaccccagcactgcaaatcaaataaatacaatctgtgatctcagctgctcttctggatgtccagctgattatgtgctcagagcatctctgtagaataggcccactatgggagaaaaccattttatgtacattgctgagcttatagcatctacaagcacccagtattctcaaaaaagaaagaggtaaggagatagaaaaaggaaggaaagagtgggtggagaaagggggccaaatgatggtttagtattctctgcagggaaaacctaaagctgtgatgtccttgaagctttgatctttgggctggcaatgggagtgcatagtttgagattttcacataaagcttgcagagatggcctgaatccattggtacctcctggctcctggtacaagtaggtgcaaattctgtttaaaaagaaagtatgatcaatttaggcctgcaggagtcccacagactaactaaagcaattatagcttgatcaaaggtcaccaggcattcttgaaagtaagtcactgtgagagtttagcgaaaagagaactcaaatcctcccaggactgcagttattgactgtggactcaaaatataaaattgctgcatgcaaaacacttagtggaaaaaagtatgaatcacaaatattaacaagatgttgtcatcagtaactaaacaaagagctatattccaactgaacagaatttataagacaaaaataattgtccaaatttaaaagtaactgaatagatgtgtccatccgctgtatattgctgtggcagatacccaagagaacaacatagagggagtgtttatcttggctcagtacttcagaggctctacctcatggttccttagctctgttgctcttggagctgtacacaatgagccagggaatgatggacagggcatatggtgggcaaagtggaccactcctgatagaaacaaactgagtgcagcatacaagaccagtccaggaatgaggtaaatctttccagggacctgtttcccatcaacctggccccacctcccagtaatgatgtgggaagccattaattaggtcagagtctttatgttttaggcagactatagccagctggatttcaaactttcaacaaatgagccttcttggtgggaaaggggaatggggaagaaagtatagtgatagacctagaaacagagttgtaaaagagagattgtttttatctaaagatgtccagagtgaaatctatgatggtgaacatgctcaagaaaagaactgtttcacaaaagcatgctacctatgcagcttcatgttgaggttaaaccatcgaaaccatgtgatgccaacaaacaagaagaaaattcctgcaatgacatggttagatacagaacagatgcagcttctaaacccactacacccatcccaaagccttgtacagaaacactgtatttagtaacatgagagcagtggagtggctcagaggctccctcctgtccatcctactcaggaagtagacctgcattaatccaggagtagatatggcatgcacagcttaaaaaattcttaaggaaaaagaaaaaaattaatgaccagcctgggaaatgtttctgaatgctaagtaccactcataaaacatagactaacatattttccttcatttatattaaaactataactcacttttataccatgaataaagtaagccatagagttcaggatactttactccaaaatgtgacatcctgggattcaggtacttaaagctggtgtggggtttggaattggagaagctattgttttgttttgagaaatgacagaaatgaacaggtccctttggtcttctccttgccttcccagcaaaacaggctacatatcttaggaaagatttccctgacctttacctgaagcagcaaggcattttacctgcacttgttagacttggggtgggagtggagctgcctcataattaaaggaaatgatgtatgtatgtatgtatgtatgtatgtatgtatgtatgtatgtatgtgctggtgatagttatatgagtaagtgaaagctattcattgaacatttcttagaagaaacatgtataaatattcaaatatctctgtcatttttatcaagtgaatagtagagcttgtttcaacagcacgtttacaaactatggaagatctgatggtgccattatgacataatttacacactaatgatgtataatgccagcaggcagatcaatgagtagcaagtcacatcatgtaaagttgagttttcagtctttgtttcaatcatagtaaactggatatgatacctggttgacagattactaacccccaaagtggaatgagggatgttagattgtttggtgataggtagatggttctaaatgactagggtaatgataatgcaaggtatgtgtcagtaaatgggcttcaaaaggttgactgggacctagtttaggaaaaccttgtatgtttgaaaaagttggggtacctatttaattaaattcacattttagaaatggcactctgttagcagagtataggctatgtctgaggaagccaacacaagaagcaggaggctttattaaaaacacacaagttggaagacagggctcatggcagattcatgaaacatacatacatacatacatacatacatacatacatacatagatccagctttgtttaagatgttggacagcataccatggttccattttacccatttattacatgtcagtaaattggaagcttagtgaaaaattcatatttacaatcaaatgtttgcttttaaaagaaaatgaagcaaaataatactttctatgtttttacccttgcgtatactcctgaaatatggcactaatgtgtacgtgaaaaaaataattctattatttatttagaatttttgcaacatttttgtgctattgtcattgagcaaaaacaaatctgaaaatctctggcttgcaggagctacattaaacatcatgaaattaactgtaaaatatttgtaatagtaatacatagttttattttataattattttagatcttcatgaatttctgttccattcatttgaaaatcacaagttttcaagaaagtttctctgttaaataagaaaaatactttccaactctgcaccaaaatgtatgacatgtggctattttcttccttcaccaataaaactctgtggctgactgttccaagagtggacaaatttcaccataagatcctgagaggtggtaaagcaagatgtcatcaaaggatcattgagttaaataataaatacttcaagatgcccctaaggtggagaagtccacagcagcagactatttaattaataacgtgtactttacaaaacccatcattatctatttatacgacagactgctaacattttttaaaactactttttaagtgatgtcagtttgctcattcaaaggttctctttactatattagggactcaaaaggctaagttgtaggtcgcatccatcccacctgcccatagttctagcataagagtctccacttataaatcctcttcacagctttattcacttgacatctcacaaaggttcgttttatatatagtgactattttaggaattactatgtctagctggcatgccaccatcttggaaatgtggtatcatatccatagggtgactgcacggaaatgtaccttagggtctttactggtttgaatcttaagtgtaccccatagtcttgaccatttgaatacttggttttggtaggtttgagagatgtgatcttgctggaggaagaatttctctggtagggagctttaagggtttaactactctgcaccattttgagttctctgtctcttcttcatgcttgcggtttaggatgacgtgagccctcaggttctgatccaacctcagatccacctcctgctttgtctactctgccaccattaactctcaccctctagagctggaaacctaactaaatgttccctataaattgtcctggctgtggtgttttatcatgatagcaaagtaatacaagactccttgcattcctcataaatatctagttatatgtatgcaacctttgaactgacccaaagacacacagatctacctctccccttgtcattatttatgtaatgcagaaatcactttctatgctttctattatttaccagagccagcaaatcaatttcgttatagtatcacatttttagctactgtagctctacaatctctacaatacatgataggcatgtgcttagttctctttgtctgaatatcttagctttgtggcctatgttctaggtaactttttttagtcaaaggacttactgataacatgtctctccaaatataatggaaataactaagaataaaaacaatgtcagatccaataaccaaccccatgctgtcttgcctggaaatttacttgaaattggttgggtggtagtttggggcatggacatgaattcaagctacttctagaagagtaaaattcaacaaatccttgcattttgaggaaggcatctgatgcccataccatttgttgtgtgtgtgagcagtgcctgtctttctgcgtttactcagttaatatctttgctttgatgaaggagaggcaggatgcagaggagaggtaagcagccactttgggtataagagatgatactggtctgcattaatgtagcagaggggaagaagaggggtataaagcagggattcagaaaggtataggactttataactaattgcacaagaaatgggatgagtttctgtttatcctaggtatttcctctttgcctgattagtcttttcatgattataaataacttaaccttcaaatattaatcaaaagataaagagagggagagagacagagaaggggaaaggatgttgctccagtccccagcttcaagaagacattagcatgtcttgtgctataaggaaagaaattgtaagtatcctgctgtgaaaaagtaatgtaatctctcatttaaaaatgatgtgttgaaggagatgcacacatgcaaggaaggtcaatgatcagattattgcatggtcaggagttcaaggaaatgttgatcaggaaagcactgatttgagaattgtcagtgtggatggtaacccaagttatagaaactgtaaaatcacaaagccaggaagtgtggaaatccatagatcatgaggctgatgcccttgagggacccaaaatgacagccagtccccatgaatgaccaagatgaggggcacttataaaagaatcctggaaagaataggccaaagtcttggcagtgggaaggacactgccgctgacgtcccactgaaaggcagtatggccaggaacatggccaggaaagtcaagggcttctaacattcaaatacagagaaaggtgcctgttgaagtccagccacttgtaagatgttgcttctgtcagcttggtcatgtctttccatgcatcacagccaagaacaggaaaaatatatgatgtatcaggaagatgtgtagagactgagtgtggtatatctaaagatgctggaagatcacctagaagactgcttagagatgtctggaacatcagtgatgaaaggaaaaatggttgtgtttgattccagatattagaaccgaccttacttctatataattttatatgaccttcctccttttgcccagaatggaatcaattctattgtattcatggaaagaaagacatggtatataaaagggttttattttagctctcccccccccaaaatgcatctaataaatgtgctcagtaaaagtaaaattctaacttgtttttgttctctcattgtgcaaagaattatgccagtctagtctcctaaaaactgggggttctttgaatgctctctggcaaataaagtgtgaaaagatttacgacaaaggaaagcactctgaaaaggatactttccattgtctttgtgcaaacataaattatgtgagacacaggggtgtaaccacgttaacaggttatggctgtcactgaagaaaataggaaatgctcgcttaaaactactatatatttccatttattaatcttataaaaatggatttttatttatattctttggtttcgccgtgcaaaaccctagaaaaataaatgtgactgaagtgtacagaggaaaccatctgtgcaagctgagttgggaaggttgcagttagatgctggcctgttctacatgatgagtttggggccaacctggaattcatagaaagatgctgtctacacagaaacacctccaaactaataaatttccagattttcttttataaaagtactgttggttgataatattagaaataataagtgattcttctatagaaagtttacatttcagggaaaatggctaccacatcatacaaatatggagaatctcattcaagtttggtaattatttaacagtcaataatctgcacaagaattataaccacaacttccaaagcatgtttacccttgatcgttcttttttttttttttcaatttgggaattataaataggatccatctctaagaggtctctaagaggatgatcactttaaactgatcacatggatacccataatacatgaattgtcttagcgccctgaacactgaacccatgatcaagcttaacagtttctttgtgcaaacactgactcttagattgcacattccactgctgggaatgtatttacattatcttctcagaaaaatttatttctgttaaaactttttttaaaaaaattcttaatcctctgaatttgaagctgcgtgcccgtcattttgtgtgagtttcataatgtaatcacgcagtgtggatggaattttaaaatctctttatatctgaccttctattcacaatatcgaccctatctgtccatttgtgcatttctatggaaaggctgaggagttctgaaggttcttataaaatatagcatatgctacatgttacagcttaattaaattatatgaaggagatggatctggctgggaaatgaccctactcgatgtacaagcatgtgtgtgtacaagcgtgaggacctgagtttgggtacccaagtcatcattatccaaactactaaaaacctacatgatttctaacatggtatgaatcttaagagtgtaatatgtttccatgcaattgtactgtgccatgataatcaaggacagaaaagcagtgctggagtgctggggttgggagacagctctgttggtaaagtgcttgctgaacaggcagaaaaactggagttcaaatcgctaacatccatataaaaagctgggtatgtcagcacatagccctaacctaagtgaagaagctaaaataggtggattcccagcccaaaacaaagctcagagagaaactcagtttttaaaataacgacatcacttgaacaaaatagaacactcccatgtacacacatgcataccaacatacaaatacatacagagagagaggtgggagggaaagaaagggagggaaggagagagatggagacagagacagagaacatatctaacaagaactgattgtccaaagcactggcagttgactccataagtcaggtatgtcagagtaccaagggattatcatctctattctgtgaaagtcaagtgtagtgaagcaacagatcagagagtttagtgagtgagtcaactctagaaattatcccatagatgaatatttctctcaggagatttctatatcacttttaaaaattccttcgtgaaagtgtacctatgtaaaccaatccagtttgatcattacaaacaataaacattttgtttttagatttttgcattctacctaggaatacaccccacctgttttaggcgttcatgcttacacaatgagtaggcgtatgtacacatccatcaaactgctcaagaagaggaagggatgccagcacagcttcggcaggcttggacgaactgcaagtaccattgtcacctactcctaattaaggacgtttcctatagctgtaatgccgagaacagccatactaccactgcccaacgaacttcctccacttactagggaaaaagcaagctgtgtgtggacttacagtctctgcttaagagtaatagtgactaagccactgggacattttattctgtgcaattaaaaaaaatagtttggtgaactctttaacaaatggaactaacactttttcaaacactaattttctgtttagatttaaagtaaaatgaagtaatattactgagagagaggtttacatcatcaccattaccatcatcaccaccaccaccaccaccaccaccaccatcatcatcatcatgaccatgagtttaatttgaaaaattaggttaacctcgtgccagcaactttagggtggaaaaaaaaatagacattaagatacatagaacatggatgttggagcaaaagaagccaaatgaaggaactaacaggttggcacagcaacagatggataactttctaaagagaatagacaagttttcctggagatatacaggctcagtgtagatcttgactgtagcatgttcgttcagccagggtctctgaactcttaagtgcatggtacagtgattggcaactgaaaacagttttccaatatgtttaatccatagaactccctggcctttgtgatgcatattttcagcagtggggggtcataaacctggcaagtgagaggtgctgtgttacaagatagacgatgtattagattctctgcctgcccttgagtgattcataatctctccttaattctctaagcctcgggggttttgtgtctgtaaagtacagataataatagtttctttgccagtttcaaggtaaatgaggtaaaaggaaaatgtcttcagtggctttccggggcttatgtattgattaaagttttctattttaattgtggacatgtgtgagggctgagcatgattttgagaatgaaaagaaaaaaaaaaaaaaaaaaaaagtaagggcctgaaaggatcaagaaaaaaaataatcttcttaaagtcacttcctacatttatcagtagtgaggaaatgtgaaatagttctgggtatatttccttatgttttttttttcttctgcttaaactgtttattttaacttctgtggtggattataaactaattcttactagcctgaagctcccaagccctcttattcaggttcctgagttctggaattataagcagctacatgggccacctcacccagttaagaggtcattttaaaaaaatgaagtgaaaaatggtaacttatatctgactccatctcttcccagtgtagtaattctaaaaatcttgttgtgactatttaaggcatttgaagaaaaatagcctaccatcctctttaataacaattttttattccttatgttaaaatggaatagcaaaataaagatttttttttaccttaacttgaccctaagactcccatgttttagaacagctcgtttctgcatgtacattttcaggttattgctattcatgcttgttctcctatggctatttctgcctggaggcaatcttcctgtgcatgaagaggcttccagtcacctgtttctctgattcctttagcagcagcaacagaagaaccagaagtgatcccagacccggcaaagcagacagacagagtggtgaaaatcgcgggcatcagtgctggcatcctagtgttcatccttctcctgctggttgtcatagtaattgtgaaaaagaggtaggtctgatactgtcctctaccccacactcggatattcgactgattttcatgttttccttccaagctgcttgacaaattctcataagagtgcccgcacctcagcttcttatttgggctttttaagtaaagtcttctttacctatttgtagtttgttcaaggatataaacatagagcttggttaacatttatttaatgtaaaactataagtttcttgaacttcagagatacgtgggaaattcaacttattttgagtgttgttattattaagcataatgaaattgatggctatacagttacggtgcttgggccaaagtcggaattattttcatttttaattaatttttttaaaatatgggttgcatgtgagacatgcatttacttctctaattaagaatgttgtttaatgacattgtatattaaatattcactgactaatttaaaaaaaaaaggaagagtaaatgcttaaattaaactttatcttttatactataccagccaatgtcgccacctcctggagttcataaagatattatgacttcctggaatttaaacttttgttttctggggataaaagtatactcttgctcaaaagcattttatacacatttttttatactttgagctacttgaccattatgtaagttgtcagaatttgtaagtcattgtctttgaaactagtgtggcccttcaatcattccaatcatgaatttttaaataatgctataatttggaagcattttagaaaaaaagaaaataatttttatatagagagtgcattctaagagcttcatgtgtagaggtggttttgcttttataattgtactgattgtgtaataaataatgttgcttatattccgtgaacttcatagtgtgcaattattattgctttctacttaaaataaaacattaacattatggataagactcatctgttaatcacaattccgtgagcatctattttaatatattgcctctttacaattgtccccggagatatatatgttggagaagacacatctgcattagaaacattaggtatgcaccacagtgttttgtgttcaattagctacatatgtgcttttccctaacagtgctttctctttgctgttgtctacgacttctaggattggtaacacgtcctagtcgagccaagatttaagtattttagaaacactaggttttcaataaagatcagtaaaatcatggaaaagaaccttcagactttacttctctgtttaatttaggtttgtacttggagggtggaaaagccaaatgacttagagagcgaacttagcactgcttcatccttaagtggaatgtcacatccgattggatgcattagaatgacttctgcctgtgttctcctcaaagtggagttaaacctagtagcagttgttctttatatggagacttacttctttttgatggatttgtacctggaatgacaactgaaagctaaggtccttcaggttgcttaagccagtcactaaagcaaggttgggggaagggaggtaacagtctctgacagctctctaaaatcgcacaccttcactgatgcttcttctggtctacattgtcaatgatcagatcaacaagcatccattaagtggttcacatttacctttttgtaattgttgtattggatagaaagtctcctgagctctcagctccctcggcagcagctatgtgactggggaaaaccattatcttttagaatagatgaggtgtttgccaccttctggactaaatcgtgcctggattgctttaactccttattcactgcagcacatttctaaaggcttcaacccataggtgctctctctctctctctctctctctctctctctctctctctctctctctctcacacacacacacacacacacacacacacaccctgtgtgagttaaccacgagtaatttattataccacaaaagtatgtagcagtcctggatgtgacagagtttagcttaaggttctgtgttattctgtagtttcatttgacttcagaaattcataataacaataatggaaacagaaatctttacattctcaccacctgccttttcacaagaaattgtaaagttgctttagcctatccctcactgggaataatatatgtagggatatttccctcattgaaagtagttctgtgtgttttggttgcaaaggaatagcttagaattcaaccaaataaaaccttacaactgagattatagagaaagtaagttcttgggatgtgaaagggatattgcacttttcagaacgcaatgtcattttattttttagtttaatcactgttgaattatttccaaatatatgccatttttcattgattgtgtacattttaaatgcacagcatgaatacattacaactttctacatcaacttgaaatcatgtttcaatacagtaaatgtttgtgtataccatggtcacgtgcatctactgtgggaataccttcatgtatatgtagcatatggtacctgtattcacataaagtgtatatattgtgtaccatttagatatacccaatgtgtaaaaaaatataggtgttactttgcacacattaacatcataattttatgttttgtatttaaaataaactgctatatttagtatacacattctatacacagctgctccatctgtcatgacattcagatggcaatggatgatagaccgctttaactgcatgttgaaaaacacacaatccatttaacttttcagttctctggcaatataagaaatgtcagcatgttactgttttcttttcctaattctgtattacaaattttatttttttgctgcattatctgtctgtttaatcgcatggcaagagaacgctaacaacgcatgggcaacgtacaatgcagagcctaagaagccagatttcattttgtttcgttttctttttaacgcacatttttctgctctcttggatgcgacggagtcatgcttctcattcaccattgcttctttttcccactgtctgtgatctgcttcccaggaggagctactactcttactcctactacctgtaagtagaaaatgggtcatgacaactctacatgtgtccaaaatgcaataccccttttcaaaaagcccacagaagcagtgtggtccatttggtagactttcaaaataatatttttctggacgctaaaactatagagtattatctcttttgataatcttttttaaaagggatattgtgtttctgtatattcagctacttttaatttttaactacaatttttccatgagtagctttatcttacagctaagaacatcatttatttacttatatcaagtctgtaccctcttagcaatatatttatacatctggtaacaaatgtggcttgaacttcctactctagatgttgtattacactatctactactctattacatttgtgaaaataaccccagtgaaatatttgtacagcattcagactgtgctcaatggatgcaaaccagatcaggcctacatgtgtgtaagatcactttacatattttcccagttattcaaaagcgtcataatgtacaattatctttgctggccagtaaaactgttagtatggtcttataaaataaactgataaaagagaatgtagtaagtagggcagagacattgaaagccttttgtagaatgggggaaaatgagtttgtttactacaatttagagattttatgaaacaagccaaaaacaaaacctgtgaactgactaaggagtcacaagactaacttggagaacactggccattcaatttcctgagtcatcttcagttgactttgttagactccaagatagttagtagttcagtccaaggaaatagcactgtgcaaggctcaaagattgaaattgtgtttgaggcatacagcctgcagtgtctctatcactaggtaaggttttagtcagcttcacagcaaaattttatgagtcaatcacttcaacacagtgctgccaacgttttaaatattacaaacatttggcttcctacaatctgttaaaacaagcaggtgtaaaataacagtgctcttagcttattgtgatgaatcataatacacttgttaaatcatgtttgatgaagccagtggcaattaactgtaccatttcgtacaatgatggcgttcctttcccctttatggcccacccatacatccacctgcagaagtttatgctgttggctgctttgataatgaaagtcatttacacatctgtcaaactcaagtactctcaaaatgaattgcctaactgtcctgaactgtgcattatatatgctcattgctcatgggaagacaaagcatgagacataccagaatcaatatatatttagttacaagaatgtcaataagcctaccattaactgtcaatgtatctatctgtattagaatggatttccttttttgggcggggggagcacagttaacattgctcttcttgacatcatagcagattatactgttgctgtggttgacacataaagctattggtactttaaatcctaactagataaaaatgtgacagggatataactgtcaaaggctacttaagcactcctagggatactaatctcaatttgatttcttttataggggtaggaatagaatggagttcaaatggaaaaaaaaactacgatatctgatcttattttcattagcattttgttatagtaacttcttttctaattaaaacacttacttagtactggtgttaactcattgtgttcacaatacccggaatgagagcctacatcacagggtagtgtggtgaggatggaggtgcaagggaccatctggctgcgcctgcctggctttacagctactcacaaaggttatggtccagcatagtttgcttattatctaagttgatggatcctgaaggtccttgcttgaacactttcccactttagttcttgaaaaaaattactttttaaatactttacccattcatgaaatacatataaagtattcattcataagtcctctaagtttaaagttgtcgtttccattggctctattctgcccatttttaaatttttaacattgttttgaatccatgtttcatattatactgttttattcaaataaattcatcgtgcttttaaaggaataaaccaaccttgcgcaagaaaagaaaaaggtttagagaaagattgcaagttttatttgtttgtttttgagacaaggtcttgccatgaatcccagttcaggaaggtcttgaatgtttctgactaagtcagctacttctgagtcctaggattaggattgaacaccaccacatggggctaaaacttatttgtcaagcatttctctactgcttcaagacagtatatctatgttgtatttgtgttcttttctaatgcttagcaaacagtgttgccattactgtcgatttcctaatgtagcaaaaaacacagtataaatagccgggtactgtgtaatatttgaagctacggaatgaggtcattcttcattgattattagatgagcaaccttgggcacagtatttaactcctctaagcctcaatgaactcatctataagatgagaatccttcagcagtgttcagtgtattgatctgagaatgaattgatttatccaatgaaaagtgccaagtatatagcaggcacactttatctcttcaacaagtatttactgagtgactggtttgtgctctaagtattctggctctgatgtctaggtggtgcaggtggtctttccttttattgagaacatagtgaggaaatgtctgaaaaatactgtcatgatgcgtgacaagtggtgtctccatagatgaacatgttactacaaaaatcacctgaattagatcgtgcttggatcagccatagcaagcattcccagggaagttcatttggagtcacagtgaatagacactaggcaagtattagagaccaaagcatgtcgcaagcttaagggagaaaatcttttgtgatggtgaacgacaggaagtttggaatgtggatatctgttgtctacatatggtctggtggtgtttagggtcaaacattgtctttagaaaatgaaattattcaatagtgctagcacttctatttttttatgtccatttatttataagaggggtatcattgctcccaatatcaaataaataagttgttcaggttttagaaaaattaaactagaggccagagagatggtccagcagttaaagaacacattctgttcttgcagaggacttcagttgagttcacaacacccatgtcagacagcttacaactgtgcccataattccagctgtgtgggtatcagatgcctctggccttccgaggcactcgtgcacacacacacatacacacacacaaacacacacatgcacacacacctttaatataataaaaatacctgaaaatggtaacaaaaactaccatacccattctgaaacattgctgttatttctaaaaattcaaatcgtttttaacatttgtgtcaagtgtcaggagtccttaggacaagttggcctcaaactgttcctcattttctcacacagttttcacctccctgcatggtatctcatgtctctctctagatctttatatttctacagactttcctcttgacctggaaagaacagttggtaacacttactgtatgcaacaaatgtcaatgagtggtggtattaatggtagtgactgtgtagtgatagctctggtggtgctgctggtggttgataatattcttttgtccttgtttttaatattactaatgcctgctcctccttctatatggctgataggtatccatcagcaaagcatggtttgtgcctgctttattctgtttggattgagatttattttttgtgtcctatatgttggttgtgtgcccctttggtcaactactacaatcctcagaggaaaataaactagaacaactcttgggctgtacaaagcactttaaaaggaaatcttgtggacacatgctccatctattcaatgagcctttgtagtatttggggtatgtttgtatagatagtaatggggaccagaaaataatgtcctgccactgaggtaagaaatgccattcttaacaactggaaaatatttccaaggcagcattaactgctgtcataaagtgaataatatagtttacactggacagttgtttacagtgcctctataaagaagttgcctggtgagtgtgagttaactcttttatataccattagtagatttttagtttcatgttcatgaacaacacagagaaacaaaaatatctgggttgttggaagtgtttggctggttttgtttgtttggttttgttttgatgtgggagggaaaggggtcagtgtgtcatttgaaatggtaaaactctaacttctccaaccctaaagagttctgctgctacatttactagacacttctgtcgtggacagtatgcatgagaagtctaaaatacatattggggttggaccatgtcagtcctccaagccaatgatgattgacagtaaagctctgcatagcgttttccaattttccctaggacctttcttacacagcctatgcttcagctccatctctttgtaagtgcttgagtcacatctggacagggttgatttttaaaggactttggattagttttgattaatactgtgaatgttctgctccgtgtacctgttttctgtgtgtgtgtagattttactttggaacagcagaggagagaaaggcccttctccttgttttagttggcagctctgataaagcaaacttaagtcctgttgttagcaagactatctagaagttgatgaaaggcagtcttcgttcaggaggaaggctggaacttaaatttttaaagtttttatataaatcatctgtgaattaacttttctttagaagtgtttgtttatactcttgttaacgctttttatgaaaactattttatttttttaatagtctcatatataaacacaatgtactctgattatttccatcatccagtaccctcattttatcgtactctctttccctctgaacccagacataaatagaagaaatagtgaaactcttggtttgacaatgagaatatcgagaagctcacaaataaggtcatgctacaacaacgagcccatgtaatggtttgcgtgttatcgtaactcctgaaattaggaacagttcttagattttctaatctgtgtctgtaaccttgtctggtgtcagctgccccttagggctcacactcaggcctcccttttgtatttattttggcagcaagcttgctaagaagcgcaaagatgcaatggggaacacacgtcaggagatgacccacatggtgaatgctatggaccgaagttatgctgaccagagcaccctgcatgcagaagaccccctttccctcaccttcatggaccaacataacttcagtccaagatgtaagttacacattaaaaatttcactaatgcctttgaagcttaatctcacacaataacttttgaataatgaaagaagaagtcagagaagcagttagggagagtaaaacacaactgacgttattttggaatttacaaaaagacatgtgttcagttttggtacagggtttagtttaacttcaaactagggattttgttatgaaatcgtaagaaacattcagaacatagagccatactgacagaatgtgtcattgaattatgttaaaatgtcattttctatataaaattggtgtgtgttatttatattttttctttatagaagataagggttcatttgaaataataaaaaacaataattctttctaggcattaatggcataagtaattgttccattaaggaaatctagtattagttctgaagaactccaataccaaaaagttaactagagatagggaggtaagttcatggataaagaacttaccagacgggcaggaaaactggagctcagaacagcagaaccctcataaaggccaggtatgtgtgtagccacctgtaatcctaacacttggttgacattcaggagtgggtccccagggcaagctgactagctagaattgccgaaattggtatggagtatgaaatctaaaagtgtagttgtgctgactggcttgaaatgcttgatgaaataacatttgcattcattttcccatttccctgtacatagattcttctagaattactaatgttgacctatgaaggatttgcttttaaaatatctctattgaagtcccacttaagcacagaggatttgaataattacataatttgaatatcctatgaaaattattccctttcaaagttttgtgtttatttaaatttaagttaatgtgcctaattaatttcttcgaatcttccagtaaaattgatgctagagatggacaaatcaagtttgtcattagcatttcatatataggacatttctgtaacaggtttgatcctaacttggtaaacatgcatgtaaggggacaagaagcaaataaaagaactcatattctatgctaactataagcatagggaatagcaagtttacacaacattttaggttataagtctgtgtcatttcacaagggggatttttggtggggggttggtggaaaactttagcttgatgaaaaatttcaggaattgttggctgtcattttctagtgtatatccataccaaataaagttagacatactgttagttattttggaattcagttataatcatgttaaggactatctagcctattttacttttatttccctattaagactgaaccacaaggaacaacaaaaaagtctaaattctatgactgttgaaagtttgcttaaaatatgagtgtatcatcctccaagtccttgattcagtatttaattgattacagcgctgaatgtatttctctgccatggacccttctgtttgttgcccatagcaggaccggactataaagtgtcaattctgaaagtgtaattataaataccccacttatgaaaataaaggaaggattaaaccaattccccacagttagctggggaaaaattaattagaatgattatacgacctttatttctgtacgtaccttataattgagagatccaaaatgcaagattccttttcccctaattttgtcatctttataatattacgctaaataatctgcctttttaaattgaacagaggcctgaactataactattctcttttgtcattttacaataaccctgctagaaaaaagacttctacccttgcaaagtacagaaatcaaagcaaactgtatcattgtatttttaaagaaaatacaaatcaactattaaaaaattactgtaaaggaatattaattgtaaagaaaagtagaatgtagagccaaacattccttcataagctctgttttccccacagtgcccaatgatccacttgtgccgactgccgtgttaggtgaggcctaaaatacttatcaccagtttttgttttattttattgttcgcatgcatcacagctccttgcataggttgtatcttgtccacatagcaacaatttgccttttggtaagtgtcttgctatttcagataagctgccatagtccaaacatacagccaccttgtttcaatatagagaggcctggtagatttaaatgtaaagtaccgtttagaacaacacaccagcttctacttgtattggacttgaaacagaatttcccctaatggatggctaatatgaaatgaaccctaatagtccattgccaagagccaagaatgtctgagcaactagctgatgtgggaaagtcagctctagctaagagattttctaagtccctctaactttatagcaactaagtaggagaacccggttcatttgctcttactttgtcattttaaccatgggtaatacaggggaagttactaaaattttgatgcaaggggttggcatagatgacactacattatatcacatcacatcacatcacatcacatcacatcacattacatcacaatcacaccacaccacatcacatcacaccacaccacttcacatcataccacatcacaatgcatagtatcatggtgcaagaacttaaaactgagtttaccttgatcatacctaagaaaaacggatgttgcttgtaatgattctggatcttttggttgcaaaactgcattaattttcaaacctatatatttcagaacagatcgtgtctcacttaaagttgcttcttatttcctgacaaattatccaccaatcattttgaccagtgtgcattgtatatccacaggttgtttatcagtaacactcttggggtccaacttaccccccaaacccagattatcaataaacatacctttaaaattacccaacattatatttgatatttatgcttaatatttcttgtgaacaaggaagcttcacttagatatctttttgctatgtaggcattcagtttaaaaagacattacaaaatatttggggattttgcatctaatcagttaacataatgtatacttctgcactaaaataataattttgaatttatagaccctataaaaataataaatctaactctaactactcatcctgcaatgtgcatattcacagtgagatgaaggtgggctgaggcattttcagaacagttgacctgacatgcatggtgatgacaggggaaatttcaaatgcttctacataacaccttctgttgagaactgtagagtggtgtcagtatctcaaattaataagtagattttctttaaattaaaataaacactggagaagaatggtttgtctaaacattaaaatccatcatggtaattttcccacagtcatttagagttaggttccaatcttagcatgtatgtataaaattatagtgagttcagaaaaccaacttgcaggttcagtcttttaccactaagaaatggcatgcttttctcccacagaactgtatgtaaagagaaaaggagatagtgcatatgagctttacaaactattaaggctaaataattcttacgatatctcaaatgaaaagaattggtcgtgtttaaggagaggtcgagctagcatagtagtgacatagtagtacattgttatcatgtagctttcttcattttgaaactgaaggtgattggtttaaaaatcattggctttctttgaaagctgactctcattagtcccattagacatctgattaatatgttccatttcccatcattcttagaaccatgatattgatggttgtctttcatccattcactttgcatttatacagaattttttaaaaataatttcaaacattgcttcatatctatatctacctgaagattctgaaaggcttggaaattttttatattgattcatatttttatcttttgtgttttcactgcttcgttgggcttaagtccctataaccggtaagtatattacaaagacctctagaaacctttcaatcaagacatagctgaagttattattcttcaatgtataataaggataatgatgagcacaggcacccttgctgacagttgcattattaggtagcttaatgaggtggaaatgtattgagattaataattcatatgtgattattcaaaagaccttactgactattgtaccactgtattaaagctagacgccacacagagcctttgctctttcataccaggatacagtcatttatacgatgtgcagtgtgagtcaaatctgtgtttctgagcttcttagaattgtaaaggttctgctgtttcagcagattcaagatgagctctatctaggcctgccttggctgccttacccctcagcctaggtgcttgcattctcgctcctgacaccctgtattccattgatctctcctcatcagttgtatatcctgtggtagagcctaaaccagttgtttctgaatttaaccttacagggagatgtttaaggtcatttgccagcctattgattgtaatattctagtgatgataggtcagttgacagcagtttcattggaagcagagggaactctaatgaatcattgtactagcaaatgtgtggagaagggtggtttaaaccggaagaagaggcagtcattctcttgagtggttgggtccttaacagaccccaccaaggactttatttctttcttatttctttctttttcttttttctttcttttttgtttgtttgtttgttacgttttgatgttcttatttggctttctttgttggtgatttttggttggtttggtttttttgttgttgttgtttcttttttttccctttagtgtgtgttatttttagacatgaatacaaaaagaaaatttgtttaataagagagggtaaagataaatgcaatcaagctaaattacagagatgtagaaatctgattgtagggtcttttttttttttttcctctccaggaagaaaaagtgtttgtcatggggacaacagttcattttttgccatatcctatttgtagagttggcgatagagcaggcagatgtaccagcacttgaactatggttcactgttaattaaatatcattctctgcagtaagcattaccatttcaaacgcaagttcccctaaaagtgtactttcttttctgttaatgagtgtgacagtattatgcttttcacagaaacattcctccaatgtttgttgttttttttttaatggtaagtttaaatgtgattaaatataagcatgtttctcattgtaatgcttagttctttgaacattaaaatgctgtttattcttcataggcaagacgttcttggttctttcttcatttttatgacagaaagagagttaaaagtgtctttccagtttgaactaaaaccatggggatggggtctatactcaaatgctggtggtgaaggattctgtagaattttaactaaatcgctcactcactgaaatatttactgaatttctggtaatgagtctatagccaaagaagatagatagatagatagatagatagatagatagatagatagatagatagatagatagttagttagttagttaaaactgagggcgagaaaagtggcatgcagggattgtgtttgacttagaaacattaagacagccttgtaaatcagtgtgggggaggggctcaggattcaaggaaggtatcctcatttatctccagtacccctgatttctctgactttgcagatagagaagtcaaaatgcactggcaattaaaacaatattacagtaacaagaatccaaggggaaacgcatgtgaagcctcctggagggcagaggggtgggggtgagattctctattagtatttctgatccagggtgtgctgtgctgagaaaggaggggaaaggtggtgagctgcgcatctctgcggtaatggggatgttgtctgagcagggtctctgagggaggttggattatgagtgtgaaggagtttatccaactgggtcaatggtgaaaacgggtttttttttccagttgtcagcttggtcctctggctcctgtctatgctgttgtgactccaaatgctaaaaaccaaggcaactcagctaaatgaatccagtgtcttcctgtctctcccagcatctgctatcttgctgatagacatatgttctgacctttaacccctgagccaaagtgaaaggttttgtctttaagatgattgctgtcccagcccccacaccaaccctcttggctggcttttcttttccatccttctactacttcaagatttaaataaagtcttcacatcttctttgcatgcttatatattaaacaagataactttatctcttttttaatgttctggaatatgaaatctgccagatgagaaccacagtgccacagcagagtctagtcgtctcctggatgttcctcgatacctctgtgaagggacagagtccccttatcagacaggacagctgcacccagccatcagggtggccgacttactgcagcacattaacctcatgaagacatcagacagctatgggttcaaagaggaatacgaggtgaaagcttcaatactgtattgaattttacttttaacatgatactcaatgtaatgtaacattttcttcccttcaacaatacaagagtgggatactctgcaatctctctagtccaacattgagaaggccttcatatgtatgtattgggaagcaggaaaatgaaggagaagagcccttcctggaagtgtattcagggttacattcattgtaagagtcttgggaatggattctaaaatatttcagtgttatcaaaaacactgtactagattttcccacagtttcctattcaaaagtcaagaaaaggatccccagagctcctctgtagtgtgttagggatgctatcaccaattgacttacatttcaggtgtttctctgtgtccttgcttgcaaaccctctaatggtgataataagtcatatgtgctgcttgccactctcgcctcaattttgtgaactgtcagctgcgggtggcaaggaagaaaagctgaacaccacaaattaagtatacagcatccaaaggggggaaaaattaaatgtggtaaatttcctttcatggtatatttctctttcctactcagaccgaaataccaaggtttatcttacaaagaaaatgacttaaatcacattccaagaaacagcaaaaagacaatgttccttccacctatttcttgctttgacctctcagtgtgcaacactgaagccggtttatcctcatacactcagcacagtgtgtatggggacgcacttagagtagagggcacccagtgtgtcttattccaaagagcagccaaacacattcaactccatggaaagaactttaaggttcatatgccatgtgtgggccacttgtataccttatttggggtgagagaaattatcttaaaattttgaatgcccgctttagatatttgagaagtgcccaaaataagggcggggagttagaatatcctgccagagcggtttctgcttgctcatttcatgtatattcctgtgtactctgcttcaaagaatgttggctctttgaagaccctacttcctgtgttgagcaaagttttaagtttaactacaaaaaaaatgagagagatcttttgctgcattttaaattgctgcatgattaaaccaaccagtgtgcccatctgtcaatagattcttggagaacaagaatctttataagcccatttccttcagaaaagaccccatcttcatggccttcaaagagaaaaaaaaatgacagattgcacatgactaaagaattatgggaacaaagtgatgttttttcctgatataaaagctgatagaacacatttggaagatagacattaaaagtagtttttctaacttttaatgtattattatgtagacagtttgaaaacagagtgatatttttcctacttgtacctcactggagtattttcaaggttctgtttttctctgaagttcctgctgggctctcagctaagatcagaccaactcaagatgaacaatctaagggctgagaaacaaatgtgctcatggccgtagacagtcgtgcccccacccccacaattgtggcttccactgtgtgaattttaagagcagataaaaactgttgtgaaacacaattaagctaggtttgcttatcaactctttgctttttttcttcttcccagagcttctttgaaggccagtcagcctcttgggatgtggctaaaaaggatcaaaacagagcaaagaaccgatacggaaacattatcgcatgtaagcatcttgacccttgtaaatattacatctacaaacctgaacagtgagttaccacttccatggttttgactttaggtaatcctaggagtaacatagctgtctgaaaagtgatctactgaatattaaaaacaatgttactgccctcaataaattcattctgattcttgcctttgaaaaacttgctgatttaaatttttgtttaaatatatggaaggttactaacaaatgttgaagaatattggggtaatgccaaagttttttttttcagttatgaattagtagaacatcctgtgggtcatattcaaggttgctgaggtatttatttcccatgcccttataccttacctggaggcagggactgaactgcagatactaaaagccattaatcactcagaagttccattcagatgatatctgcatgaagacatgcgaaatagcaagtcatcaccagaccagccatggaagtagcaaggagagtggatgacctaacttgtaattatctggtggttttcttaaaccagtccactctgaattgaaatcattctaaactatctagaatacattaaaacataatctgtctctcaaggagtgaaaaacaggttcaaagttcacattctagttagtctgggggctgtaaaatccattgcatacgcccgggcgtgtggcgcacgcctctaatcccagcannnnnnnnnnnnnnnnnnnntcctgtctcaaaaaaccataaaaaaaaaaatccattgcatatatgaagagccatccagactttgtgttgccacctgcaaatttcccaatgtgaaagacaagccgtcgaacctgtgttcaaagctgtcattggaagaagtagcaaactccatgtagttcttgcatatcccagatgattgattaaataacaatgtagagctttgaaagtgtggattataaagactaaatttgtccctgcgtttttcccactccctgactgtctcagggcagaggaactcaaatagcttgcatctgatttttttttttttttttttttttactctttgtccaattttttattaggtatttttttttatttacatttcaaattctatcccaaaagtaccctatgccctccccccaccctgctcccctacccacccactgccacttcttggccctggtgttcccctgtactgaggcatataaagtttgcaagaccaagaggcctctcttcccaatgatggccgactaggccatcttctgattcatatgcagctagagacatgagctctgggggtactggttagttcctattgttgttccacctatagggttgcagttcccttcagctccttgggtactttctctagctcctccattggggaccctgtgttccatccactattggatgctcatagtcagcgtctgattatttaaacctttcagatgatcactccagagtcatcctgcaacctgtggaagatgacccttcttcagattacattaatgccaactacatcgacgtaagtgtccttacggtgtctttccatagtgtgcccactttatcagctcacgtctgtgaactcaatgtttgttgttacctatgacttaattgctacctttaatgtaaagaacgaactgtacacttttccttgttctacatcctagtacttactgacactgttgtgctttctttctcacctgactttggtttgggctgtagatttggctgtacagggatgtaagtaccactatatgtccataacagcaccctctgatgaatatttattataaatacccttaatcgcagttactactaatgcttagtctagtcgtttctgcatgtatcacctaattagtctcatacgatatatttatgtttcatttttttgtaattattttacgtgcgtaaagaactattttacttcctcccctcttactggggctgtttttggctttggcaatttattcttatgcatttgaattttatttgttgatgatttctgtctctggcttttcttcttcccttccctaagcatatgtgagaagctggatggtatgatgtgcattagtggttttgaaattttaatttttaatattcactttttatgttaaaagatgagaatggggccaggaatgtacctcagtaagtaaaatgcttgctgagtatataggaagccctgagttctaatcccaaatactgcacaaaccggcatggtggcgcatgcctgtaatcccagccattgggaggtagaggcaggtgaatcagaagtggaaaggcatcctgaagtacagagcgaatttcagggccaacctggcctaaataaaaccccatctcaaaagcataaataaatacaataagtagggagactattttgtggtgtgtgatattggcttgtaaagttataaaattcttcatgcaaaaaaaattctgtatcatgttttaaacatatatatatatatatatatcacacatatatactggatcataccaataaggtctgttttcattacatattgtgccattaaattttggttatacatctggacgtggcaatgatttatgcaagtgaaagtgtaattatcaaataaaattattgccaaagaggcaatatattgtattgtatgtaaagacagctctttggctccattgtctgtttgaaatttgtacaagagggtctagagacgcatcagctgcatttgctaatcttgcagatgaccctggtacagttgccagcaaccacactgagtttacaacatccattactccagttgtagggtatattacgccctctacagaactcgttaggtaccaaacattcatgtggtgcacatacatatatttagacaaatatacctttaaaaaaaacaataaaaatagtaataataaaaaggccctggaggttttgagaatgtcactttctttctatgtgcctcagttccctcatatgcacagtgataatagtgttagacttatcattttgttggggaaatgcacatagttcctctactacagtgactcacatgtagttagcacttgccggatttcaattattattaattaagaacccatgttctgagtgagtcggatgacagcatgcatatttttaagttgagagtctactacagctttgcagcacatactgctagtgtccatatagtgatgcaccatgaacgcctacctgttctaatttctgcaagtcggaaacaatttctcaaagctttgaacttcgtgccttacagttattttaatagttacaactaattgatttaatgtattaggaatagcatacaaatgtattgtttaatttttcatcagagttttattttcataaagttttaagttttgtcagacatgtcatgaaaaaaactaaactagttgttctgtattacaaaagacatgaacatctctcttacaactttgtaattgttcttagctcttagtttaacctaaagttttgttttggtttttggtttttgccataacagttacatgctggtgccttgctataatattattttatggtttattgggcagaactttattctaaataaaacttgttttgcaactctgttacgatcccagtatattttagctaaatacagttcaattttattgtttccttttcttgtttgtatattatacacaaaatgcatctctgcaggttgtagatatctcatttgaaatagaaaactgaagtgcttattaaactttgaaatacaattccatgacacgttctggattattatgacttaccaagaagtcaaaatcagctgagtgcgcgggtgcaaacctgtcatcacaatagcttgtagtcagttgtagatggatctctttgagtttgatgccagcccgttatgctgatatgtagtaagttccaggccagtcaggactaataagaccctgaagactctgtcctcccccaccatctcctcccccaaaaaaggagagataattttttggtatttatagtagaatgatgtacacttattacatccctggtcagagactcctgcccgcatgttccacacacactgtctgtactgagctgcccataccaaatacagacaaatcttaacaaatttcacagaaacctacttaactctatcatgccatcaatattattttcaactcacctgtggcatgttggccattgagagcagacaacaagcagatcgatctttatcaagaagaattcattgaaacaatattaaatctctatgaacaacttttgcacactaagaaccactagaatttttgttcaagaaaaagtacagttttgaaaactttttccctatatatgtgtgtacttaagtcatgtgtgtgtaaatttcattttatcagcacacacaaaatagttcctgcagattcctggacatgttacagaactaaaatattaccaaaaagaatatgacttaacttcagcaggactttgatttgagcacacatgcattgtccagctctaacattggcatggtctgctcctttttaccttcctgttttctggttctaatatgtctttgtccgtttgtaatgcggtgtgttgtacttttgaatgatgcaataagaattcatgttttttttaatagaattttaccaagagtgaatgatgtaaaacttatatgaaggcataaacatgttagtgaaactaaactaaatctccagggttattcttcagcaaacaaaattcaattatacaaattctaatcagagcttctaaaatacttaagcctgctgtctgttcacacttcacataacgtaggttcgagaagtggaccctgtgttcactactcagttctgttcctttttattataacctaatcttgagaggggcttttcttccccttttttatgccttcatttatttatttctgataccaatgtaaaatgataaacaatttgctttcctactttagggctaccagagaccaagccactacattgcaactcaaggtaaaattttgtctttcaaatgctatatttacacttatttatattaaatattatttttatagttattattatccaggagttaatctcttttgtagtcttgtattttaaaaaaagtaagcgcttactcatttgtatagtaccaacacttgttcaaaacctaggaaaacttaatcttgattctcttttaaattaaaatcctgtgatgattttgtgatttgatcttcgatgatcaggtatctcagtccactagacagtagttttgggaaaaagcattacttttgatgaacaagaagtgagcactcttcccaccttgggtagctgtcatcttgtaaccaattttgtcagcctgaagagcagtaagacccaagacccatagtgatgatgagatattgtactgtcatccagcaatttttgacaaattgtaactgaaacagaatgtagtcaagtctatttcttatgggaaagaaaagcaaagaagcttggtcctaccatgctgcaccgagaaatgaaagaatccaaacaagcaaacaaattggtagttctcagaatgtctgctggccatccacagaacgtgcatgactgcttaaagaggaaaggaaaacggcatgcttctcttttactcagcttttgctttgctttgctttgctttgctttgctttgctttgctttgctttgctttgctttgctttgctttgctttgctttggttttttcctcctttggtactgaggacagaacccagggccatgaacttgctaggcaaatgctactggggagctaaatctatttcctgacatttgctcttttaacacaggtcattttattgatatttagccttttgttttagtaattggatttaattgaatattctttactgtgagaaatctgtaaaactgcatgatgcatataccagtagttctacatgggtgatagacagcacatgcctttgcagctaggtaataatatagaataatagtaataataataattaataatagtaataataggatgtaaggacattactttgtttacttttaatcatacactattcataaatgatggacatttggttaattggcaatgtcttctcacagtgtcctgagagttctgttttccacatatacatacaagtacagtagagtaccatagtggcagggataaacaccttagaaagtatgataccattttatgaattgctacttctagaagacaaattgaaagaaaaattggtacgtgtctatgttttttgtgtagcatattttccaatataaactgaaatgaagtagttctagttgtagtgtaaagagaattttatcttttttagcttgtttcatgaacactactttttatgtattgcaaactttgtattacctataaaatatctatgctaacataggatgaaaaattgtttacaggcccagttcatgaaaccgtatatgatttttggaggatggtgtggcaagagcagtctgcctgtattgtgatggtcactaatttagtggaagttggccgggtaagagaaaactttatttatttatttatttatttatttatttatccatttatttattcatgtatgtatgtatgtatttatttatttacatgtatgagtattcttgagaataataatcaactgtcttggaaaagatcatccagtagtttaataatatttcatagacagaacatcttgattgaatgctcctaagtgagctttcaatgactgaaaaatatttgatttctcattgaataataagataatctttaatttttaaaaataatttctgagaccggtatacacaaatgctccccccttctccaattctttccttgaacccagccaccaaactcataatctcctctttatttatgattgttgcacgtttatacaacccacagagtccatatgctattgcttgtatatgcctatgcgtaggggaggccacttgggattggaccacttatgagggaacttttggaggaaactaagataaacttgaattttatactgacatgtaactgaactattagacttaacatttttttgaaagtgcacagtctgtttcttgtgtatcattttctcagctgtgtttgaactaaggactaaatttttcattggaatgaagttgtcttgactaccgtgtatgtgttcaaattaatctgcagctatgcattcttctcatcactaggtgaaatgctataaatattggcctgatgatactgaggtttatggtgacttcaaagtcacctgcgtagaaatggagccacttgctgagtatgtcgttaggacattcaccttggaaagggtaagcattcaaacttctattgaaagtattgaagctttcagaaaaaccactgcaaggttttgctttgattactatgaaatctatgtacctatctatttattaatctacaaattcatttctttttgttgttgttgtttttgttttgagacagggtctcaatgtgtagtgtagttctggctatccttgaactcactctgtaattctagctggcctcaagctcacagagatctacctgcctctgcctcccaagtgctggaattaaaggtgtgggtcactaaacctagcaatctataaattcttatttaagagttaaagttttggacatatactaaaatccctgtccttgttggaggagtcctcagatgcaaggatattgatattattatatataatatatgtaaacagattatatagcggcagagcacggtgatagaatacccttcggaaactagaatagaagatattgctaaaatgcaaagggaaatgtttcacaaaattaaagggctaaggggaagaacatattttaaatggcatatggaccacacctttaattccagcacttggaagtgaggtgtaagggtatgtaagaggaaggtgctcctgaaagagatgagtcatgctggagccctaaggcttacagtttctcttctgagattcatggatcagatgtcagagataggtaactcaggggaaacgaaagatgcaggataaacgaatcacagaacaagacactgaagcctgatggccagcccagtgattttcttttgacttatgccactggaggctttaaagctcaggatacaccattttgttgctttgatttgatttcattaattgattttctcttgatattctcattgctaaaatgcattctaattactctcacctctcttctttttttatactcatataatttttggtcatgttgtgacccactgagtttaagaaggtgagctaaagaagcaaaagagggtatatacttttaagagatgggcataggtccagatatagctctctcttgtgagactatgccggggcctagcaaacacagaagtggatgatcacagtcagctattggatgggtcacacgacccccaatggaggagctagagaaattacccaaggagctaaagggaactgcaaccctataggtggaacaacattatgaactaaccagtacccgggagctcttgtctttagcttcatatgtatcaaaagatggcctagtcggccatcactgcaaagagaggcccattggacttgcaaactttatatgccccagtacaggggaacgccagggccaaaaagggggagtgggtgggtaggggattgggggccgggggtatgggggacctttgggatagcattgaaaatgtaaatgaggaaaatacctaattaaaaaaaaagtttaaaaaaaaaaagaagcaaaagagggtatacactcttaagagatgggcataggtccagaaccatggctactacagaagtgattaatggatagtagaacagaaaaacgtataaacaaaggcacacacaaatctatgaatttcggtaacatcaatttgtaatgttaatgtaaatgaaaatcactagaacctgtgaagacaggcaactataaactgtctactgagaatggtcaatgaatatggatataacgttttgtattttcaaatgaacaagaagtattacaaagggtcctcattgattgtgtatgatcatttagatatggaatttgttaatgatcagagttaaaaatactttaagcctctgcaaatcagtatagaagtttaactatgggattttaaaaaaaagtttaggtatttggtgcatttatctattatatgagtctatccttaagaatgtatttacaggcaatatctaatttatattgatgaaaaaattctagataactggaaacatgatgtggcagagaaatggtcaaacgttagaaatccagagaattttgtagttgagaatttcttttaaagaatgggtgtggccattcttttagccagagaagaccattaaagtctacaaaatgtatttgaaaataataatttagaaaaaaggcaagctatatattaaggtggaacaccaagcagaaaaaataccattaaagtctggttgcttaaaaagatcaataaaatatctaaataactaagggaaacacagtgacaaatttccaaacattgtttgaggaatattgtattagaaagcatgcgaagtttgtaactagaattacatttgctgttagaaaagttactttattaaaccaatctgaaggtggcggagaagaatgtttacaaaatcctcaggcaggtgatggttcaataaaaataccacagcctatagcagagacaggagaggaaaggggaacttccagacagagatagtaactatgggaagaattggaggtgagtgatcgatttcactcaaaaatatgaaagattttaagaaatactgaatctagtcgtgaagtaagaaaatacctgaactattatatttttctaagagcatgaagacatttaaattaagggaagacatggagcataggagtgaagttatgtaatttcattaattgtttcatgaatttaatgtattatacttaaagacatttgacttcctgaatggaaaagtgacctcccaataactatggagtgcttggagtggaaaggggaatatgtattataataaactaatatagaggctgttggcacagtgattagtaaagtaaggtgatagacatttgccctagcattcaatatttttgcaaatcttagcaaattagtaaaagaaatgttgtataacaaatgttatatttttctttttattttatttatgtatgtgaatgttttgctttcatgtatccctgtgtaccataggcatgtttagtgtgcccacggaggccataaaaagccatggatgctctggtactggagttacagatggtcagggttggcatgtgggtgctggaaaccacacccaggttctctagaagtaaagccagagctcttaactgctgaactgtttcctcacccgcagttctatagatgtttttaaaaccaaaattattttaatagaagcttttctaccaagtttttaaaaaaactaatatttacttaaattactaaatcaacacaaaattcacattttcttttttaacaatctatagaaaatatatgaaaagggcttccataatgacagaacactcgacactgtctttgtctatatttagcaagacacgtttctaaataggaaaaaacagtaaaatacatcaaatgccataaaataagatataaatgaccaaacactcatgtctctgtgtatgggttacaagagattaatgtcacactagttacgcctaattctaaacagaacgccactggagtctttcaactgtttttcttgttatctaaactaaaggcagtgcttttggaagaaaggcacatatctagtcattagtctgaattttatttattaattaattactccttgggattgatcacatggccttgtccacattagtgttctaccactgaactccttcctaagctacacaagaaactttttaaataaaagactcctgggggatgtttactaccagatgggaaaaccagcttttacaaggcagcctcgcacatgtcagatgagtagagagagtgccagcataacccatgaaaccactctgctaaagtagttagtatagaggatgtgaaatatatcaaaaatgtgatttttcccatttttgtgatttcaggatgacttttgaggaattaatattgaaaggaattacaacacacaatcactagctgctgagattttgataacacttgtttctgtaagatagactctgaagataaactgccattcttaaattgatttatttagttcctgtttttgctttttctgattgaccaagtaagattaatatctccaccagtagctcacagtaaagttagattgatatagatttttttgtttgtttgtacaaatacagatccttcagcataaatttttccgtgttatatttacagtgccaatgcttcctcaaacctaaggattgcttataaaccaggagagggcgtgtcggcaccttgacacggttctcttagattaacctgatagaagagagaatggcagtggacgggtcacttccttcattgtgctgttactctagagaatactttatgagccaaattacttcacaaagctgagaaacatgatttatccagagaacagtttagctgcctgtatattttcacaaaccaatctagtgtctcactgtgctggaaaatccctacatgctaggcttcaaaaccattttcaacatggataagcaaggtttggaaatctctccttgagaagtcagtacaccagctcaaggaaactttcccctttctttcttatccctcccccagcccccaaataatttcatgtgatatcactcctagtaagaagcaagctatcaaaggcaaatacaaattacccagagaaccaaacaaaactttctttcatgccagttctctgacaataaaggttaagtttgcaggccctgttagactagtatccttaaaataaaatcagtaaatattaatttttttcatggccactaaaatttagtagccattgcgtacttggtgattttctatggatcgcttctaaaacactcttttttatctttgtacagaggggctataacgaaatccgtgaagtcaaacagttccacttcactggctggcctgaccatggtgttccataccacgcaacagggctcctgtcatttatccggagagtcaagctatctaaccctcccagtgctgggcccattgtcgtacactgcaggtgagcaacattcccaactttaaacgagcatccaaacaggacttaaaggtgcaaaagctaaatgttgctcacgaggtttgtacttgcctatactacagatgatgtagaacagaaataaaagttggctgtgggtagcatataagctaagaatagacagagtccatacattcaacctagtgtatgtcacctgcaaatacaagcatagaaagtgcctttcagtggcaacatatgtgttgggaggctttatcatttttgaaaattccatactgtatagattggtaagttgtttgtgtttttttaattttttctttttgtttgtttgtttgccaattcacttagtctccactggaatcccagcttttaaagctaaacttgagccatatgccattaggaaatggcctaaattgcaagaattggagatataaaacaggtgcataactttttcttttttaaaacattatccattagaggaccttaaaaccacattgatatgagtctgcaaatatatgccaaaacctgaatagtaaatccagatttcttctgattaaaaagttatatatatatataagcaacctgagacattaaaagtgagagacaaggatcattttgaaatagggccagaaaaacaagtacagcttctaaaaagctgctgggaacggatgcacaccagtctcagatcgtgctcttttcaagctgctgcatacatagaacttcagcatctttctttctatttgtaaaacccaacccattcagaatttcaatgccctttaataataataataataaataataaataataatacaatgaaacaaagggaagagaaacatcccgtaatgatcaaacactggacacatcttaaaggggaaaaaaagtcatttcagtcctccagagatctgatgtactctcctcaattacttacctgtcacagacactgggaacagtgattgagaagaaagtataagggaaaggaatagcgatacagaacatttctttggctaacattctaagagagaagcaagtgtaagacaggtgactgtctttgaacagcaaggaaacaatgcccttagcccagttaaccatttaaaaatgaggtacctacatgtttaatgcagagactttttgattcatcaggcgtttatgttttctcaagaattgcttgcttgatgtatgctcaggaattctatccccagaaagagaagttccttatttctacctacatggtcatctctgcatgactggaaaagaaactggctagacagtggatcccgcaccactctcccctgtctgacaccgccccacaattgtggtgcctatcttattgtctgtgaagctgtagagacttttacaaaggctaaaatattcaaagcatgttatgattctgctatataaatggaacaaaagagtggctatcaggctaaagaggtggctcagtagttaagcacactggctgctcctgcggaagactcgagttcaatgttcagaacccacgtggcagctcacaactgtctgcaactccagtctcaggggtccagtgcccacttctgatgtcctaaagtaccactcacatgaatggtaaacatatatacatacagcctaaacattcattcaagtgaaaacactgaagtatgtagagtacaatttttttgtattctacaccttcccatattctatatgtaagtatccattaaaatgtatttttaaatttttattaaactaataaaatttatgttaaaatttacaactcagtattggcatctttaagtcatcaaaataatttatatagttaaatacctcttaaatatacatgatatcttctgaagctaaaagtaatatgcactcaactagtttttaaaatatatttggaacattaaattcgatagaagtagaaaataatctcttgtgaattcctcgatgaaaggacatcgtgacaagttcctgattagaccgaaatcattccatctccaagggagaatactcagaataaatttggcttcatagaatgaattctgtagtgttcattctgtttctattttgtggaataatttgaggagtattggtattaggtcttcttggaaagtctgatagaattctgcactaaacccatctagtcctaggctttttttttttttttttttttttgattgggagacttttagtttagatggtttatctgatcctgatttaacttaggtatctgtttagaaaattgaccatttcattcagattttttcagttttgttgaatataggtttttgtagtagaatctgatgattttttttaatttcctcagtttcggttgttatacttcccttttcgtttctgattttgttaatttggatactgtctcttttagtgtggctaagggtttgtctatcttgttgattttctcaaagaaccagctcctggttctgttgattctttgtataggtctttttgtttctacttggttgatttcagccctgaattccattatttcctgccttctactccttgtgggtgtatctgcttctttttgttctagagctaacaggtgtgctgttaagctggtagtgtatgcctgctccaatttctttttggtggcagtcagagctatgagttttgctcttaacactgctttcattgtgtcccataagtttgggtatgttgtgcctttattttcattaaattctaaaaagtctttaatttctttatttcttccttgaccaagttatttttgagtaggacattgttcggcttccatgtgtgtgtggactttcttttgttttgttgttattgaacaccagtcttagtccatgttgatctgagaggatgaatgggattatttcaacttcttgtatctgttgaggcttgctttgtgactgattatatgatcaattttggagatcataccatgaggttctgtgaagaaggtatattcttctgttttcagatgaaatgctctatagatatctgttaaattcatttgatcgataacttctgttagtttcgctctgtctctctttagtttgtatttccatgactgtccattgctgagagtgaggtgttgaagtctgccaccattattgtgtgaggtacaataggtactttgagctttagtagtttcttttatgaatgtgggtgcccttgcatttggagcatagatgttcagaattgaatgcacttcttggtagagttttcctttgatgagtatgaagtaacctccttattctttttgataacttttggttgaaagtcgattttatctgatattagaaggtctcctccagcttgtttcagactgtttgcttggaaaattgttttccagtcctttactctgaggtagtgtctatctttgacactgaggtacggttcctgtatgcagcacatgttgggtcctatttacatattcagtctgttagcctttttctttttattgaggaattgagtccattgaagttaagagatattaaggaatagtgactgttgcctcctgttatttttgatgttatttttatgtttgtgtcactatcttctttaaggtttgttgaaagaagattactttcttgctttttctaggatgtagtttccctcctttggttgtaattttccatctattctttgtagggctggatttgtggaaagatattgtgtaaatttgtttttgttatggaatactttggtttcaccatctatgataattgtgacttttgctgggtatagtagcctgggctggcatttgtattcccttagggtctgtataatatctacccagcaacttctagatttcatagtctctggtgagaagtctggtgtaattctgataggtctgcctttatatgttgtctgccttggtttctgttgcttatgttcttgcccttgcctgttaccatctggttatctctcgtgttagctggtcttactgtctctgactgtggcttgttcctcctgcaagactgtgtatcagtactcctagatcagttcactccattaggagtttgggtgcagggtcagctcagcggtgcagacgaaaccagaaagatcctgtccccagctgttccttggttttgttgtcctgatggctctgagtgggtccctcttgggccaggaatttgagcagaagtgttggccttacctatgctcacagatgtgtctgcacttctgggagactagctcttttctgatggtatttgggtatggaactctgtgacacaggatcagctctgggcacagatggaaaacggaaggctgtaatacaaatttttaaaggcatatcgctatgatgtgagtggtcatacatcctctgtacttcacagtgtactctggtagatagcaaatattctctctctctctctctctctctctctctctctctctctctctccccctctctctccccccccctctctctctctttttttcagaagagcagagggggctcttcttttctggtagcatgattctcttaaccaaccttctgctttggcttttcctgtgaactatggctcaccatatgtcccattgaaagactttgggatcaatgaccttgatggttgcatgacccttactgagctgggaaggctcctcctgctgttggacagctaaagacaggcatgtgaaggaaattcaatatggagttagattttgtaggtagcttgatcccaccactgtttgaatcccatgagtgtgaaattataaaatattataaaattataacatttataatatgttataatatataatttataacaaaaagcaaagtctatgtgatagaggtatgaaacttgagcaatatgcagacattatgttcagtgtagaaataattttcaatgcttgttgcaatataagtacatgcaaaatcagacactgtgtatgaagttgttcattagtatgttttcctgtggcatatagaattatatgtttgcatttcattaagtcattttgatgacgtgtgactcaaaatacaatagaacctcaaccttgcaaagacaaacgtgttctcatgcttctttcaatttctcagtgctggtgctgggcgcacaggctgttacattgttattgacataatgctggacatggctgaaagagagggtgtggttgacatctacaactgtgtgaaagccttacgatctcggcgcattaatatggtacagacagaggtaaactgatttgcccttaatacatttttcttgttttgttttggttttactgttgtgtctaccatataccaaatgggacatatttttaatatataatcaaccttaacacattaaatcatatagaaaaactttggtatcttaatttaatagttccatttcagtatattctctgtcttctctaaactttattaaactcatatgaaattgtctctctttccttttgataggaacagtacatttttattcatgatgccattttagaagcctgcttatgtggagaaactgccatccctgtgtgtgaatttaaagctgcatattttgatatgattcgaatagactctcagactaactcctctcatctcaaagatgaatttcaggtgcagactgcttctaaggtttctatgaaagtctttccaatttgtactgggcactaataactcttagaaaaagtctttcaagttaaatgtgtaacctttgactcttctgaaactataacatttgtgtttttcactacatacattatgaattaattttttattaatgcattgatatctgctatatcctgacaggcaaaatgagttcattgtctgaaaagaatattagaaaaagatactatagatttcaagtctggttatgatttgagtgtttataatttctttatttctcaaatagagtctcaatattttgaccttcattggcatgttctatgtatgataagcatcaaataataataatatcaggaatttgtatcaaacattgttgtgctcactgcctttatacatccctcagtatggaagaaaatgagttcacacgtagctccaggaaactgctatttagattcttgatgtagtgttctaacatgacaaaatgtgattgtaaatggtagcttcctctttgaaggtcatcattaccattgtggatcatcatgaattttctttgactgtgcagtgagtttaatgtgtagctgtgtggttttgctattccttccttttgaggagagacacgtgaataaaaggtgtctgctgactgcctagcttcacaagcttcattagcttaactaaagagtctatcagcctgtcacagaggcaactgccttggccttcaagtgccaaatccctcaccttccacttggcttcccaaacacttggtggatttgtgttatgtgattaaatgggtcactatcttctaacctctgttccctttcctctttagactctgaattcggtcacccctcgactacaagctgaagactgcagcatagcctgcctgccaaggaaccatgacaagaaccgtttcatggatatgctcccacctgacagatgtctgccttttttaattacaattgatggggagagcagtaactacatcaatgctgctcttatggatgtaagagactgactctttgtttgtgaaaaatgcccttaaaatctacagaactcaactggacactggctactttttttttttaatttggaattataaaacagattagaaaggataactgaaaattgtcaatgaaatacaaatggaaaaggattttaggctgtatctccagggattcttagcaactataacatatataggtttattgtagatttgagattgatagttacagtatccatatagaaaaaaatcatgttatatatttcatcttaattgttttaagatttaaattaatttcatctaaattgagttaagagaaattggcactttattttttttaacagtaagaacacattttaaaatcacagaatgccacaatctaacccaattgtggattttttaatttggaaatagttatctgtgatgctcgttgttccagtaatttaaaagtaacgagttttattattagctgagactatttagaaataactaaggaagacatgagcaatatcatattaacaaacctaccatcaagaaagaattattttgacttgctgcattgctaatacttacaggttctcctgcgtgcatcccatgtgacagttgtccataaacagaacaacagggacaggtttacaattctctcatcaaccatcttgcattggttatctcgggaagaagctagaaagctattaggaatcagaatcctttaaggcaatttattattttcattcctgtttcattttcatctacgaaactctagcaaggaaaatataggaaaggagtcttttttttctcctgactattatgaggttttctaagttgctaccccttttctgtttttttttttttaaagacagggtctcatgtattccataagacttgtaacattctgtgtagtgtctccacctctccagtgcttaggatactaggcatgtaccaccatacccaagtacttgttgggttttggaaaattaatgtcaataaatgtatagcctagtaacaatgtgcagcatcctatggtctcctgcaaagactatgcttacatggttttttgctttcttttgtgctacagaacctaataatctgaaagcaggctctcactgaaactaatcccaaccttgatgtaccctgaaacatgccagtatagctttaattcgatatatttgtattttagtataggtcatgactgacagattgcccaggccagataaacattgctttaacaactacagaaagtagataccacactgagaacatgttgatgttctcacagcataataactgtacaattttgaggtacctgtggtttttcttttattgaagaagaaatgaatcttgtaactttatttacacacacacttgtagaaatgaaatacatatggacaaagcagagatgttttgctgatttttcttgcagccttcagaaactcattacctttgggaaattgaaactgtcatggacggtctttccctcagggagttcacccatctctccctctgggtgtgtcctacgttaacatttgtccgtgagataaaactgggagggattcaaacactttgacaaccttaaactctgtcatttactggttccattacattctggaaccagtatgtcctgtagcttaggcaacattccggttccatacctatgtaatgttgctaccactacttggtcctacaatggagtacactgaatctgtttgtacaactgactgtgaattttattcattttttcagacttttataaataataacaatgaaaatatgatcatgtctacatcccttcccccttcctgactatgcattttatgttcttgtatttctcaagtatcccatttttccacagagctataggcagccagcagctttcatcgtcacacaatacccactgccaaacactgtgaaagacttctggagattagtatatgattacggatgtacctccatcgtgatgctaaatgaagtggacctgtctcaggttggtagacatacattgacaatgtgcttttggatacaacctagcagaataataatacgatatcatttcctactttataaggactctaattcccttcccagagttaaaaaaaaaaaagaaagaaagaaagaaagaaagaaagaaagaaagaaagaaagaaagaaaaactctcttatcttttctttccaaacacacctagggctgcccacagtactggccagaagaaggaatgctgcgatatggtcctatccaagtggaatgtatgtcttgttcaatggactgtgatgtgatcaatcgaatttttagaatatgcaacctaacgagagtaagtctctctctctctctctctctctctctctctctctctctctctctctcttacgagtatgagtaagtctttattggggtcattttaactaagctgatgcagaggaagtagggatgtaatcatatccaaacaacgggaaaggaagaattaatgagcaccacacaacccataccagagcccctggtcaccttatgtcttagttccaggacagtatgtgttccagacacaggaaccttgaagtgctgaaagctaggttttcctctcaatgattgcaatcacatgtcccattttcaaatctagactcaggcagtttctcagtcatctctgatagtctcagcctggtcccacagcacatgtggccttaggacaaggatgaagtctcaccttgttagtattgacatccagaccagaaaaacatactaatgaaaagtaagaataatcaggatgacagtagcaggggacaggatacaccatgccagcatcataggacacttcccagtcactgtttcaggacccgtgtgcaatgggagaagccagccacaactctcccacccccagcgccccatcgacatattcttccttccacctcactaaacactacagcatctggctctgttcacttctgaaggaggagtcaatgttgctaacttttgctttttgtcagcagctgagtggcaattctatctgtcccacagcaattttttgttttcctgacaagttacatgctttgtacaatagactctctgaaagtcttttttaaaaaccaactgacaaaaaaaaaaaaaaacaaataaatctactaaaactatttagcttatgtaactagatagtaaccagaactaaaagaaaataaccttctcaaaacagcacttctaaaagagacaatttccttgtttttaatgatattggttctctttatgtctatgattttaagtatgtcattagaactgtcatatttcttatattgaaaaaactatctgtatatcttgctaattaggctatatgaacataagtaagaataggataaactcataaccaattccatcgttcatttcagtggaggaaaaaaagaatgaattcagtcataatatccatgcatagtttagattgtaatttaagtggaatctcattatgtttgcacatctgtcttaatatacttctagtaatgttataactaagcaactgtagctgctcaactctagaagcaaagcttgtctgtgagttgagctttttctatggaatgtattcagatttgaaatctgcattgctttatttttttttctccagaatatatattgctttggttacgtccctgtatatattgtgtcctggtgcttattaatccaattttcattctctctttcattatttggtatcattcactgcattgtgagtttagtctatcagtgcagtattagaggagatgaggtacatagcctttctatgggagacttaagatctaataccttgtgatcactcactcagtgtgctgtatggtcccctctgtattttctcttcagggtaatatgtcttccagaagcagtgctattttgaaagtatcatgcaaagttcttgcaacacacagtttaaggcaaaaggaggaggtcccttatctctaaagaatgtataccttatcagagaaggctagcaacgcatgagtaactttaccagtgtctgtttactgacatgatgtacatgtcagaggagaagcacagactataaattgtttcactggatgttcagacataagtgacccgtaaagatttctgtaaaataagagtatttaagcaaaaaaattgaagaattcgtaggtattatttgagtgtgggatagctagagacagagagctttccaagaacactaaagttatgtggcattatgggaaagtctgcaggcaaactgtggtcaaattagctattctacttgacagttaaaagaacactatagaaagaagttctccaaacaaatgggacattctcttcaaagtccccaaggcaaatagaaaagaggtaaatgagcttaagagagaccagtgtttccaacctcaatggcatgttagagggaaaagaggtgtgacagtggaaacgaaccagatcatgaaaggagttttacatcctgatagactaagagcattacgaactcatgaggtctaagaacgacaagatcactttcgaacttcagcaaaatcatgatgcccgcagtaagaatagatggaagggagggtggaccaacctacttcacaagcatgccaagatatttgtcttcaaggtgactttagagcctatcaagttggcaatcagtataagccatctcaggcaaataaaaagaacaagttgtgggttcttgctgtcatagcttggaatgtttctgaaaaggcaccacaattactagactcagtccagtataagttccctctgtactataaatagtgcatgtcttttaccatatgttaaaggatctcatcctgatgttcataaaatgctggttttctctacagccacaggagggctatctgatggtacaacagttccagtacctaggctgggcttctcatcgagaagtgcctggctccaaacgctcgtttttgaaattgatactgcaggtggaaaaatggcaagaggaatgtgaagaaggggaaggccggacaatcatccactgcttgtgagtaggacagggcagggcagggcatcgtggccttgccatgcagggagcctcagaactcatttcctggctagcctttgctttgtgtgtgtttaaaagatgttcctcaaatcctggcagacaaaactaccatagctcgtatttcaaaatagaactctagtctcagaaatgaatattttactattaattttagttttgttttctgactattaaatctaataagagatgactcagtagttaggagcagtgcctactttcctagaggatctgagtttgatacccaggacctaactggtgactcacaaccctctcttgactctagttccaggagatctgatgctcacatctgacctctgtgggcagtgcatgcgctgggtatacagacaacatggaggaaaacatatccacacaataaaaattatgcagttgttttatggtttaactctttcaagtacctgtctggacaacttctgtttcaggcaaatggttaggatctcaacatctctacattacaacaaattatgcctgtcacatattcctgctcataagctcctgagagaacttcatcctctagtatcctcccctcttcccttcacacacaaatgtagaggagaatccaaagaaatgggagaatttttaaagataagtgtcctttcccaggagagtgtgatggtgtgacacgtgattcccccaaaggtactaagcatgtctttgctttcaggaatggcggtgggcgcagtggcatgttctgtgccataggcattgttgtggagatggtgaagcggcaaaatgtggtggatgttttccatgcagtaaagacgctgaggaacagcaagccaaacatggtggaagccccggtgagccacagaatctttcgagggtctcagtgactactcagtcatatacctactgacttgtgggtcttcacgcacatagaggaaatcagtcagatgtgcacatgaaacttgctgggacgttgtgactaataggtagagtgtagctagtctggctttgcctgtataaatgcattccccatcacataacctgttgggtgaagaaaatggtctcatgcgatttgagaagtgaaatttgtcctccttattatcagtgaatttgtgctgtgcagtaaatagttctaggaaaataaatctcactaaagtgtagtcacttttttgcttgttgaggcatattgagttaagtcgcagatatactcataggtcacctcagaatcttagacacctattttctgtttgttcacttactttgttttaattgacttattttggtgtgtgtgtgtgtgcgtgtgtgggtgttgttaggtatggaacccaggatctcaagcatgctaggccaggcattctaccactgacctatataaacagacctgacgcccagtgtttttgaaagagcaactgaagtttatagcagctattatccataatccttccccatctaatccgaatgtaaattgtcagtctgtccttgctgtcagctgaaaagcttttatcagccttacagtacagtgcatataatgtgacaaaagttcttctaagctcacaaagcctctaaaataaggacaaatggggatatgtgagcaaggcttcatctaaatggagctgtgtaccaagtaagaaagttactgcctctgtaacatgcttgacttgggggttacacataagtacaaagagactgggaaggaagagcagctgcagcaatcatagaaaagaaagggagaaaagccagggcatcactgttgcttgccctactttatcaagatgatgggagcaacggaggtgtggggctgtgggagggagagaggaggaagcggggggggggggggagagggaaagagagtgagggagagggaaagagggagagagagagagagagagagagagagagagagagagaaatttagtaagctcttggtgtttttaccacttcctgcttggggttgttcacacaggaagtgcattgtttcctgagacaaacatctaaagacttcggtttatgctgtttcactctggctagtggcagctaacttctccctttctcaaagagtgctcttaggagactccaactgggaccagataacgtcaccttctctggaatgcaggcagttgagaaggacagagagtattgatttgagaatttttacatacagactggacagtagatagttatcactctctggtttcaagatgtataacctgtgaaatatactctgcctgaaacatttcaagtcacatgccttcagaagtaacatctgtctccaaatttgcctttgatataccaccttttgacttctaagtttacagttgaatatttgttctagaaccttcccatgagttactgttttccttttttatttatgtcccacaaatcttgacagagttgacagaatgcactgcttaatcaacatcaatgattaataaagtttactatggtttgggctgagtttgatatggaaatgtagatttaaacaaaattgagaggcactgactggctgcaagcatttttttttttttatctttggtgggacttctcccaggaagctaatgtagagcatatttacgttggttgtcagagattctggatattttaatatttactttaagttctgcactagttcagcctgcctagattttacctgcttggactgggctgggaactgtccaatgaattatataatataagtcatcatttataacagtctctggtctttttaaacttcttgatagtggattttaagtgactacactcaaaagaagtgttattttaactcaaatgttgcattatcaacttgatcaacaacattgtcaatcaagttgtcttaattaagaagaggtgtcaggaatctatttaggcataagtgagcttgaagggttatttctttttaattcttaaatattccttttaaattggttgaaatggtactctgataccattgcaaaaggtagcatacagggggttcttctcatctctctctgtctctgtctttcactgtctctacctatctgtctctctgtctctctctttctctctctctttctccctcacttttatctaaagagatcatttggaatatggaggaaagcacaggcacacaccagcagcaatacaaaacagaaagatattgaaataatctaacaagtaatccagataatccacatggtagatttttgcgtgatataaaaagactcaggatgtgtaacatacaacatgtaaaacagaaaatcctcttgagaactccgattttttatttttctgagacgattactatgtcaatcgtgtactcttcccctcccccatgccaagacagggtttctctgtgtagctctggctgttctagaactcactctgtagaccatgctggccttgaactcagagacacaccttgtctggttgctgggattaaagtgtggtccaccacagcctggttctttacctttttgtaagctgggaaacattcttaactattttaatcctataaaaatccttggcactatattaaatgataggaaatttagggcaaagataaaacatctttttactgtttcttttttttcttaaaagggatcattagacttgagaataaaatatatatggccagatgttcctgttatatgcaaaataagtaatttacgacttttaaataatctaaattgggtgtcaagaactcacacagatgctattactcaccattagccttttgctaactcctttcatcccttctgttctgacatgatgcaggagcagtatcgtttttgctatgatgtggcgttagagtacctggagtcctcatagttcgctgagactatttgcagagcatccaagcagaaatccattcgtctgttgagccagcagctgttgtacctgttactgcaccgagagattttaatgtacggggtgggaggcttttacattggagaggcaaatgtatttttcttataaagttgtgtatcttaataaaaaggacttgatcagtttctgtgactgtatgagagcatccacatttcatgccacctaattttatctttaatcagaggcagatttggatgagaagtggtctgcgtctgtccagtgaccacacagccttttctctcctgctttctgtagagcagctaccacacattgcatgcactttgtaagtggcatttccctctctttttaaaataaaaactgtgggaccttaagaatggggaaggaaacaagctgtgcaaagtcatggtaaatttcattttatatgttccaagtgtaccagattctatataaatgtgtgtgtgtgttatatatatatatatatatatatatatatatatatatatatacatacatacatatatacatatgtgtgtatatatacatacatacatacatatatatggcttattttcttttaatgtgcaatgatggctggatcatttaaagttccttttagaaaataacataagccaaagactgaagtgtacatatgtctatatggaagaagcacattatatttattggttacttacattacttttttgatggataaaatactaccgccacacaatcatttttgttgttgttgttgttttaggagagttagctaaaaatcaatggtaaacaattttttgtagattattttttgtatgtttagtgtaagtaaaggataaactttttattcataaaccaggaagcaatgttttctgtagtggttcccttgtgtacatgcctgtgaattaaatttatgtaaaacatcttggcaattgtctttgaatagaggaccaaattaaaacatttcactgaaaatgtagttctcccccagtttcattaggtaaatgatggcttgatggttgcctatgagaaatctgcacagcagaggacattgcaggtagcttgcccaatgtggaatattacctttaagcattgtttaaacattaaagagttagtctctgcctatggcctgacactgttcaggatcaccagatgacaacattgctgcttgcaggatcaagttttagcagagtataaactgccaccgtagcggcgcagtgttctttttgatgtttccaagcacaagctttgggtttctacaatagacagtgcaaatagatgtgtggtctcattcatgtgccccacatagctgtagtgtcacatcctcatcagcttgcagtttgtgattaactgaagcattatggtgtcctcttcctacattgcctgtctatgacatggtgcttataaagatttaatgagagtaagagtgaaataaagtttttataattgtaacatttactgattgaacatcattttctcttctaaattttcatgcctttattcccaaataaataatctctctatgactcaatatgagaatgtcacaaaaatcctactgaaagcatgattgacatccaggctataatatggtatattttttgttccctaaactgtattacatagttcaggtcagtgaaggaagaaatagctaagggtttagtgtctattattattattattattattattattaatcattatcattattttattttattctccctcttgtcataatttgtcttagctgcattctgccaaatatctaagaaaaaaacactttaacagagcaagaatttattttagctctcatcatgaaggtttcagtccccagtcccttggcctccttgctctaggactgtggcaaagacgctgatgagcaggtcaggatggtacagcagttcatctccagatagctgggaaacagagagagttctctcctagagcaatgctatttcttcttttggatggaaagtggaaaggcaagcaggaacatgtgaaagagagaatattctaagtcagggttgctaagaagaaacaccttgacaaggtcatgaaagccccacatagtccaaacaccactgcctgtgctctgcctcctaatccaagttttggtatatagatcaaatgtagcagagacacctgactaaaaatttaaaaattcacaaactcatgaaggggttgtttacctggcaatgatagctgtattaccactgcatgtgattctgatttgcgcctcaagaatttgtttctcctcatagagctgcatcaaactaacagcaaatacagctattcacagctatacagtaaaccttataggctctaacattcaataaaataacaaatgaagtacttttatcctacatcaataaataaaacataccatgtttgctttgtttgggtattacagtagccagtttgtcagaagacaacgtgagaggcttaactcagactgtatagttttgaaaacctcccttggtagacccatgtgtggtcatgtccttcccaagaatgtccttctggagaggtaccttgtagagttctggaatataagccctggaatactttgaattggaaatgtctccaaagtgtgtgtgtgtgtgtgtgtgtgtgtgtgtgtgtgtgtgtgtgtgtgtgtgtgtgtgtgatagacttggtgtcatactgatgggctatgaggaaatgagtcaccatgaatgtcttaatccattaacctagtaatagattcataatctggtaacatcattgagagatggtagaaattaagagttggggatctaagaagatgacacagccattaaaatacctgccatgcaagcatgaagacctggttggatccctgaagctcactggtcagtgttactatctgaattggtaagctctaggttctctgaaaagctgtgtccaaaactaaggtggggagaaattgaggaagatatattatgttgacagacacagagagactaatagtttttcagtggaagacatgcatgactaagagcatgccccaggaagggcatatcttgtccctgtcccccgactgtcactttgcttgtactctatagcagccatgaggtaagcaactttgctccatggtacatgtcctaccatgatattcagccccaccacaccttagtaaaaccttaggaagcaaaataaaccttttttctgttaagttcctctaatcagccatgttgtcatgcaacatgcatctcctaggtaatcctttctgtatccctctagcagtttctcttgaaatatcaagtcataaggttgaatctgacaacctttctcctgaatgtcctttctagaaagaggttggaaactggtgatacacagacacagttatgcccctcaatactgttagaagcacataagcaactgggaatgtacacattttaaccaagtactttgaaaatgcgttagtgttctagccggagctacctatgcaacccttttcttgtaacaaaaggacttcagataaaggcagtgtacccaattgatctccggtattgagagggaaacaaggagacccttgcctggacatagacaggctacactggcttctcaccaatgttgctcattaaacatttgtctgttgagacccttccaggttccagacacaagttttgaaatttggactccaataactgttccttatcaaatatgtttcactcccagaaaatagaatgacagttcccagaaccttcaactaccatgaatgataagatgcaggagaatgtacctgtaaattcaactggaagtcaggcatggtcttgatacttaaactaaaaatatttagggcctaacagttgcccatttgtatttaatttcaatgagctttgacagtgattcattcttaacaaaatagtcagtaatctgtcacatacccaagttaagtgtagttagcagaatatactcataaaatattaccagagacttcatacaaactttacagccttcctaggtttgtggcagtgttataggaaagactgatttcatgtagaatctgtgtatgatttatttattgctatattaggtcaagtgaaaagataggttatcattattcactcttgactaataatctctacttatctactatttcatagggtctccctacagcttaaggaggacagaggaataaatgacatctgcaactttccacagcactagcctagtcaaatgtctgctgagtttcagaatagtatccccagagtcaaaaggaaaagttctttcttgggatctactgtacgagatatatatatcttatatgtaagatatatattctagaatataaattgtcccaagatcaatagaaatgtgatagatacatagatacataacattttagcccttccatcctccacagtgatttgaaatgctaacctggaagatagaaaataccaaggagaccctgccgcatcaaatcctaaaagaaagtaatggatggatttctaaaccactgaaataaacataaggtctctacagaatatctcaaagctctgtctttaatgttaagatctgtccagggagagaagcagggacacatctttatgacagctaacacctttcagaatgcacttgtcaattacacaagtaatattcagccccaaaacttaatataaaatggtactgccaaattagctgtttaggttttatttatcttgactcttccctgagtatatagaattgagaccaagaaagctttgaaaaaggaattgtacttagagacatgtatttagtgtacccagatgtgggaataagaaattcgaatttgaattggattcttaaatagaaattagattgttcaggcagggaaaggccgtgttaagctttgcttgtggaggtatggagccacacagtccaactggaaaagtagagaaagcatgagagccatgttcccttgagttgctgaaaagagcagtacactcatagttactgactggaagatacttcagggtagagactagaaccctattttgttttggtttcagggttttatatgaccactctggacatattgcagcagatgatgtcaccttttgctttttactagcaaaattcataaagcaacaacaacactaccctgaattttccactctatgctgagaactggatactacccactctgaaccccacccccacccccagttctgctattagaagcacagatgcaggagtcatggtgattggcaacagtcacttgacaagacagaaggaacagtgtcaggaagatgacaagtgcctcttggacttagaaatatgactacaactgaaggatacagcacgtgcccctcaagcatgcactgcataggaacacagatccattctgatgcatctcattgttcaagacaatgccaaaggaaaaaaattcaatttctaagatttgttaaagttaacaagaaacataggtttttaaaagcaaaatacaaagccttccgtgcctactggataacaaaagtctctgaaggctgcatctagtgtgggagggctttaggctcatggtcagtagcccactgtaacattgcactgttttgtactttatacatttgaattcaaataggagtttagttgtcccaaatgaagctatgccttgattttgttgttctatgttctcattggacttattttttaaaacacatttatcgagtggaaactaggaagagatggcattagccgaagcaggaagaagaggaaggtatctgagagggaatatagtcaaagtacatgatgtttttgtatgaagatatcttaatgacagctgttctttactcagtgtaccctgaaaaataaaacatggggctgggtggtggtggttctgttgggaaagtgcttgccattcaagcatgtggacctcagttagaatctgagtgttcacatgatatctagggatggtcatagtgatgatggaattttggatctttctggccagctggcctagcaatatcaatgagattcaagttcagtagaaaaacccaatctcaaagaagaagatggaatactactgaagaagacagtgagcacgacctacgacctccatataaaagcctacatacattctcttgggaacagttcattgtttttctcttttagatgagtatgtaaagtttcatccgttgtgaaagttactcttactgaatttagatctattcattccgcccaacaaaagagaaatctagctagtaaaatctttccctttaaggcttttgttagaaagtcagtcatactactaataaacatgaagccacccatgtaaatcaacaatctgagaactctgtagcagccagagaaatttgggacatataagacaatatagtttcatcagatgacaagaagcatatttgagattttgaatattaaacttgaataagttttctgtctctttccagccaacaaaaaatatttttctatatttaattttattctgaaagacaaaccacatttagacaagcctcaacccttaaagctaggaaaggctgggcatggtggctcatgcctataattccagtactcaggaagctgtgaaaggacagttgctgcaaatttaaaggcaccttgaactacatggtgagttctaggccaacctaggctaaggaagatcacctttcaaaataagggaaaaggtaagtgtgttgtccctgctcacaggtaagatcaggaaagcatatattgtgaggtagctcacctttctcttagcttctcaaattgataacaagaaaataatccttccagaaataacattgtagactcagaaagagcatgtgtctcttagccacgggatggcctgcgctgctttagtcacgagggcagcatggaatctgtggaccacccacatcccagattgtgactgtgtatgctgacttctttgacaggtgcaaacagtgtgggcacttgcccacccacaatgggaacctatcctacacttgcagaaatctaattacccgaaacccagtcagcagactcaggtggctttatttacagcttcatgttttattcttggcatgataaagtatttgttaattacttacttcgcaatgtcaagttttttactgcctgggatcaaatgtggtctggagaatggaaggagggggggcttgttttcacacataaaaaaatcaaacgattcactttctcagtgtactgatagatggttaaaaagacactgaagaaagcaaaatccaaaggactcaaggttcaaatactaaaatctagagaactcatatatctgtgtcaaagagtagataactggagatttgtgctatgatctttgtctcctttgttgccccttgacttccgcttatccttgactagaggtgtttctttgcatagagagaaaatcataaagtagggaggttttcaagcatgagggaggaaaggtaaacaacacaatgaatgtaattatgggtagattacagcattcttatatctttgtttatcaatcatatttgatgatgtcaaattagtgcgtaactgatattaagaaagattttagttctaagtaggaaaaaagtaaagatataatggtggtagaagactgtcatcctcaaacacaaaaactggataaacagagaaatcactaagaacatcatatcaagtatatgcacaaaagcactaaaataatcaagatggaattccacaaggtaaggaaagaaatacataaaaatagtaagaagaggaaaaataagagtgacagatttgggtactaacatttcaataatcactttggaccatgaataatgccaatttctagattttataaaattttacaaatttacaaaatgccaataacaaattttaaaattttatgaatcagcttatatatcagaaatgcatgctcttctggtcggtgccagcaccgggtcaccttgggcatagagttggtggacacccctaaggtcccctagaggactctccacgcaatcttaagactacaggtgaatggaacacaacttctgttccaatccaatctcgaagggcctgagacagcattaagaaagcaggaaacctggcctgaccagggtcacaagtcccttccagtcagtgccagcactgggtcacctgggcgcagagtcagcagacacccacaaggtccctagaggacagcttctgtgacaggctgaagcaacacagcttctgggacaggtcctgtttccggcgtcattttctgccagaagggaggtccaaacaccagatatctgtgcaccttccctgtaagaggagagcttgcctgcagagagtgctcagaccactgaaactcaggagagagctggactctcaggtctgctgatagaggctaatagaatcacaagaggaacaatctctaaccagagacaactataacaactaactccagacattaccagatgacgaaaggcaaacgtaagaatcttactaacagaaaccaagaccactcaccatcatcagaacccagcactcccacctcgcccagccctgggaaccccaacacacccgaaaagctagacccggatttaaaagcatatctcatgatgatggtagaggacatcaagaagaactttaataactcacttaaaaaaatacaggagaacactgcgaaagagttacaagtccttaaagaaaaacaggaaaacagaacgaaacaggtagaagttcttaaagaaaaacagaaaaacacatccaaacaggtgatggaaatgaacaaaacaatactagacctaaaaagggaagtagacacaataaagaaaacccaaagtgaggcaacgctggagatagaaaccctaggaaagaaaactggaaacatagaaacatcagcaacagaatacaagaaatggaagagagaatctcaggtgcagaggattccatagagaacattggcacaacaatcaaagaaaatgcaaaatgcaaaaagatcctaactcaaaacatccaggaaatccaggacataatgagaagaccaaacctacggataataggagtagatgagaatgaagattttcaacttaaatggccagcaaatttcttcaacaaaattatagaagaaaacttcccaaacctaaagaaagagatgcccatgaacatacaagaagcctacagaactccaaatagactggactagaaaagaaattcctcccaacacatagtaatcagaacaacaaatgcactaaataaagatagaatattaaaggcagtaagggaaaaaggtcaagtaacatataaaggcaggcctatcagaattacactagacttttcaccagagactatgaaagccagaagatcctggacaaatattatacagacactaagagaacacaaatggcagcccaggctattatacccagccaaactttcaattaccatagatggagaaaccaaagtattccacgacaaaaccaaattcacacattatctttccatgaatccagtccttcaaaggataataacagaaaaaaaaaaaatacaaggacggaaagcacatcctagaaaaagcaagaaagtaatccttcagcaaacctaaaagaagacagccacaagaacatatgccaacactaacaacaaaactaataggaagcaacaattgcttttccttaatatctcttaatatcaatggactcaattccccaataaaaagacatagactaagagactggctacacaaacaggacccaacattttgctgcttacaggaaacccatctcagggaaaaagacagatactacctgtcttagtcagggtttttattcctgcacaaacatcatgaccaataagcaagatggggaggaaagggtttattcagcttacacttccatagtgctgttcatcaccaaaggaagtcaggactggaactcaagccggtcagaaagcaggagctgatacagaatccctggatggatgttctttactggcttgcttcccctggcttgctcagcctgctctcttatagaacccaagactaccagcccagagatggtcccacccacaaggggctgaaatttcccccttgatcactaattaagaaaatgccttagagttggatctcatggaggcatttcctcaactgaagctcctttctctgtgataactccagctgtgtcaagttgacacaaaactagccagtacactacctcagaatgaaaggctggaaaacaattttccaagcaaatggtctgaagaagcaagctggagtagccattccaatatctaataaaatcgacttccaacccaaagttatcaaaaaagacaaggagagactcttcatactcatcaaaggtaaaatcttccaagaggaactctcaattctgaatatctatgctccaaatgcaagggcagccacattcatacaaagaaactttagtatagctcaaagcacacattgcacctcacaaaataatagtggcaga

SEQ ID NO: 132 - DNA, 2991 bp, Mus musculus
tcagctccaagcttacctgactatgaaggagttgatgcctctctgaatgaaactgccaccaccatcacagtactattgaggcctgcacaagccaaaggtgctcctatcagtgcttatcaaattgttgtggagcagctacacccacatcgaacgaagcgtgaagcaggggccatggaatgctaccaggtaccggttacataccagaacgccctaagtgggggcgcgccctattactttgccgcagaacttccccctgggaatcttcccgagcctgctcccttcaccgtgggtgacaaccggacctataaaggcttttggaaccctcccctggccccccgcaaaggatacaacatctatttccaagcgatgagcagtgtggagaaggaaactaaaacccaatgtgtacgaattgctacaaaagcagcagcaacagaagaaccagaagtgatcccagacccggcaaagcagacagacagagtggtgaaaatcgcgggcatcagtgctggcatcctagtgttcatccttctcctgctggttgtcatagtaattgtgaaaaagagcaagcttgctaagaagcgcaaagatgcaatggggaacacacgtcaggagatgacccacatggtgaatgctatggaccgaagttatgctgaccagagcaccctgcatgcagaagaccccctttccctcaccttcatggaccaacataacttcagtccaagattgcccaatgatccacttgtgccgactgccgtgttagatgagaaccacagtgccacagcagagtctagtcgtctcctggatgttcctcgatacctctgtgaagggacagagtccccttatcagacaggacagctgcacccagccatcagggtggccgacttactgcagcacattaacctcatgaagacatcagacagctatgggttcaaagaggaatacgagagcttctttgaaggccagtcagcctcttgggatgtggctaaaaaggatcaaaacagagcaaagaaccgatacggaaacattatcgcatatgatcactccagagtcatcctgcaacctgtggaagatgacccttcttcagattacattaatgccaactacatcgacaatttgctttcctactttagggctaccagagaccaagccactacattgcaactcaaggcccagttcatgaaaccgtatatgatttttggaggatggtgtggcaagagcagtctgcctgtattgtgatggtcactaatttagtggaagttggccgggtgaaatgctataaatattggcctgatgatactgaggtttatggtgacttcaaagtcacctgcgtagaaatggagccacttgctgagtatgtcgttaggacattcaccttggaaaggaggggctataacgaaatccgtgaagtcaaacagttccacttcactggctggcctgaccatggtgttccataccacgcaacagggctcctgtcatttatccggagagtcaagctatctaaccctcccagtgctgggcccattgtcgtacactgcagtgctggtgctgggcgcacaggctgttacattgttattgacataatgctggacatggctgaaagagagggtgtggttgacatctacaactgtgtgaaagccttacgatctcggcgcattaatatggtacagacagaggaacagtacatttttattcatgatgccattttagaagcctgcttatgtggagaaactgccatccctgtgtgtgaatttaaagctgcatattttgatatgattcgaatagactctcagactaactcctctcatctcaaagatgaatttcagactctgaattcggtcacccctcgactacaagctgaagactgcagcatagcctgcctgccaaggaaccatgacaagaaccgtttcatggatatgctcccacctgacagatgtctgccttttttaattacaattgatggggagagcagtaactacatcaatgctgctcttatggatagctataggcagccagcagctttcatcgtcacacaatacccactgccaaacactgtgaaagacttctggagattagtatatgattacggatgtacctccatcgtgatgctaaatgaagtggacctgtctcagggctgcccacagtactggccagaagaaggaatgctgcgatatggtcctatccaagtggaatgtatgtcttgttcaatggactgtgatgtgatcaatcgaatttttagaatatgcaacctaacgagaccacaggagggctatctgatggtacaacagttccagtacctaggctgggcttctcatcgagaagtgcctggctccaaacgctcgtttttgaaattgatactgcaggtggaaaaatggcaagaggaatgtgaagaaggggaaggccggacaatcatccactgcttgaatggcggtgggcgcagtggcatgttctgtgccataggcattgttgtggagatggtgaagcggcaaaatgtggtggatgttttccatgcagtaaagacgctgaggaacagcaagccaaacatggtggaagccccggagcagtatcgtttttgctatgatgtggcgttagagtacctggagtcctcatagttcgctgagactatttgcagagcatccaagcagaaatccattcgtctgttgagccagcagctgttgtacctgttactgcaccgagagattttaatgtacggggtgggaggcttttacattggagaggcaaatgtatttttcttataaagttgtgtatcttaataaaaaggacttgatcagtttctgtgactgtatgagagcatccacatttcatgccacctaattttatctttaatcagaggcagatttggatgagaagtggtctgcgtctgtccagtgaccacacagccttttctctcctgctttctgtagagcagctaccacacattgcatgcactttgtaagtggcatttccctctctttttaaaataaaaactgtgggacc

SEQ ID NO: 133 - protein, 486 aa, Mus musculus
GYQRPSHYIATQGPVHETVYDFWRMVWQEQSACIVMVTNLVEVGRVKCYKYWPDDTEVYGDFKVTCVEMEPLAEYVVRTFTLERRGYNEIREVKQFHFTGWPDHGVPYHATGLLSFIRRVKLSNPPSAGPIVVHCSAGAGRTGCYIVIDIMLDMAEREGVVDIYNCVKALRSRRINMVQTEEQYIFIHDAIACLCGETAIPVCEFKAAYFDMIRIDSQTNSSHLKDEFQTLNSVTPRLQAEDCSIACLPRNHDKNRFMDMLPPDRCLPFLITIDGESSNYINAALMDSYRQPAAFIVTQYPLPNTVKDFWRLVYDYGCTSIVMLNEVDLSQGCPQYWPEEGMLRYGPIQVECMSCSMDCDVINRIFRICNLWQEGYLMVQQFQYLGWASHREVPGSKRSFLKLILQVEKWQEECEEGEGRTIIHCLNGGGRSGMFCAIGIVVEMVKRQNVVDVFHAVKTLRNSKPNMVEAPEQYRFCYDVEYLESS

SEQ ID NO: 134 - DNA, 289106 bp, Mus musculus
  misc_feature (1)...(289106): n = A,T,C or G
aaggacacatgctccactatgttcatagcaaccttatttataatagccagaagctggaaagaacctagatgcccctcaacagaggaatggatacagaaaatgtggtacatctacacaatggagtactactcagctattaaaaagaatgaatttatgaaattcctagccaaatggatggacctggagggcatcatcctgagtgaggtaacacattcacaaagaaactcacacaatatgtactcactgataagtggatattagccccaaacctaggatacccaagatataagatataatttgctaaacacatgaaactcaagaagaatgaagactgaagtgtggacactatgcccctccttagatttgggaacaaaacacccatggaaggagttacagagacaaagtttggagctgagatgaaaggatggaccatgtagagactgccatatccagggatccaccccataatcagcatccaaacgctgacaccattgcatacactagcaagattttattgaaaggactcagatgtagctgtctcttgtgagactatgccggggcctagcaaacacagaagtggatgctcacagtcagctaatggatggatcatagggctcccaatggaggagctagagaaagtagccaaggagctaaagggatctgcaaccctataggtggaacaacattatgaactaaccagtaccccggagctcttgactctagctgcatatatatcaaaagatggcctagtcggccatcactggaaagagaggcccattggacttgcaaactttatatgccccagtacaggggaacaccagggccaaaaaaggggagtgggtgggcaggggagtgggggtgggtggatatgggggacttttggtatagcattggaaatgtaaatgagctaaatacctaataaaaaatggaaaaaaaaaaacaaagtttttcatttagtttttcttgtttgtttgtttgtttgttttaacaattcccaaagactgtgagactccactgctagataaaaagtgactgctgagagagggcaaattagtctttcctaggggtgaagccctgattggttatgtaacatccaatggtcacccctgaagacacactcacacagacacacagacacacagatacacacacacacacacacacacacacacacaccccaaaagcaaactcatcagcctgcatatatatatttatgtaagaatagtaaagaataagaggccgtaaccctccctacttaaaattactaaccaggtagacttttaaacctgtgagatgtgttccttttttttattgctgtgcccacaatactagagaataagcaaccaaagaagtgaatggttcatttgaacttaattggaggagatatattctgtcatggaaatgggcgagttgaaggaggacatggggcagctggtcctaataaacctatcgccagaaaataggaagtcgaatgtcagttctcagactttgttctctttttattcaggctctgatcccatttcacagaacaatgtggccgccccttaaagtgggtcttcccacctcagatagtctagaaactcccccactgactttcccagtggtttgtcttctggatgattccctatcttgcatgttgacagccagtattaagcatcccacccaacaagaatgcagtcctgtttgtggcattgaagaggagggcgtgacttcaacttgtgtgaactcaaagtcattgctccataggatatcaggcactacatggccagtgttgtgggtagagcgcgattgggcacttactggcatgatcagcttgtatggcctggattcataacctgtgttggttctctctctgtctctctccttctctctctctctctctctctctctctctctctctctctctctctctctgtctctctctctctccgtctttcttccctccttccctctcttcctgtctttctcccttccttccttccttccttccttccttccttccttccttccttccttccttccttccttccttcctttcttattttccttaaagatttattagtttttattttctgtgtatggctgtatgtatgtatgtgtgtgtgtatatatgcatgtatgtatccatgtataccatgtgtatgctttgtgcccacggtagtcagaagaagacttcaaatagcctacatctggggttacagaaagctgtgaagcaacacttgggtatggggaattgaacccaggtccaggcctgtgctttgacctgcctcagcgtgtcttctctgcttcttcctgtgttatcatgagtgagttttatttatttacttttctattataaggtaacattcttattagtacattccttttatctccatcccacccattttgttattttgaggaagtatctcatatatatagtccaggctgaccccaagctctctacatagccaaaatctgatactgacctctgatcctcctgcctccaccgtcaaatgctgagagtagagattgtactgctacagtttaatacaactcttttcatctgtgaagtgagttctaatggtatgtagtcatccattagtttcattgtgaggttagaagtcacagacctctagggtgaccaatatttcagtagtatgcatgtccacatgtacatgcaaggtatcatgccataaaatcccttctcttgttctactggccttaaacctttagggtagtgggtattttattgctctcttaacaccctcagtgttggacttgtgacaaattggttggttttagattctatctctaatctaaattcctgattttgaccactgctacccgtcttgatttatttgaaaaattagcttttagccagattagattctaatagtagtcttgagactatttcagatgagactgatctaagctgtgggcccatgggccacatccagccttacgcctgctttaggaaacctgttcttcaagtgcggtcttgtaatctgttaagatttttcatgtttggctgctttcttgctacagttacaagaattgtgtagttggaacagaaggtaaaggaaaactgaaatgtttccaaactggctttgcatagataggattttgtcactcctgattcaaggcacacttcctgtttgagaacacatgtagtaaatattcaaagaaaactactcgtacaaaaacctctctggagtctttctgagctagttaagttgaaaaatgtttctttttatttaagatttaggtgttaagtatctgtgcaggatcaaaactatatagcccatgtataaactaaaaaaaatatggcccagggatatagaaaggatgtactttgtagaaagttattagatgtgggcacctttacatgtgagggtcttgactaatccttacactcttgtttggtagttattactgagttgatattactggagaatgatttgaagctcaaaaaatggaaatagcaaagctgtgcatgtacttagccacactctatgttgcatctacagacacgctctctgccatcacctaagtatatgccaggcgcttaaaattcctccgctcttattacttgaagtatagtgcatttgagggtttctgatctaaagagaagaattggtgtgtaattgagcttcttgctccactctggttaatttggtcttattgaaggatggctatgcagtgaaagtatagaatttgcagacaatttaactaagaagtcttacagctccctaatattggattatacatattaaacatgtattttcagttagaggtggaactctaggaaggaagaatttgataatcaatgggtgcgtttgaaatgcattctttcttcatcaataggagttacttctacctacccataaatgatagttcttaattcagaggaaacaggctaggattgcctttctttcgcaaggtactaggctgagataatattttcgcacactaattagttgcaagcagcacaaagaatattcttccaggtatggcttgattatctttttaaaaggctcgtttataaattttctaagtttttatccactaagctcctcagtggcaataagttaagatgacacaggattcagccacccacttgtaaaggcatccattctttgtgtgtacttgaatatttctcatgcgcgtgtattttcatttttggacgcgtattgaggaacaggtgtagcttgtctttcgagctgacatagacagacactacctaggcattgatcatgtctgtccattctcattttgtacgttcaatattcccagaagtatagagttaacaagaaacagaaatctatctagacatcccagcatttttcagaggaatgttttctgaaagccagttctttacttttcccaataagatcttgttctaggaataaagatcggctctgatcaaatggaccattagttaaagagtaaaactatttatttatttatttatctatctatttatttatttatttaatttttaatccttcagaattattttggtgaggcacactggccgactcccataggcatttcacttcataccagtgaatttccattgtaattacttttttagatttaaattttttattttaattatgtgtttttgtctgagtacattcaaatgagcatagctgtccctggaagcctaaggcactgggtcccttgggagctggagcaggcatctggaaaccccctggccttgctggattcttgcttgttatagcactatatgcccttaatcactgagccatttctccagccccttagatttgtgatttcgcattagaataattaaagggcatctattcaaagcttgcttgatttaatacggtgtgtggtctaaatttgtatactgtattgatttctcttttgaaactgaaggaagaaacaggatttgatgtggattgccacctaagtgaacaaatctctacattattgattaattcacaactggtgaaggttgattctacatttctctaagaatcatcatacaattttactaagaatatctactgtattttccaacatatattccatgaccttgcatatgctcttttagaggaatacagtttttccctatgcttaaatctaactaagttgtccatgcttacagctaagaggagcttgttcatggaagcagtaaggagcatgagtgataattctgtttgtctcctgtatttattcttggtcagtcaatgatacacagatgagggtcctggaaggaacaaaagtgaagatcctgctatgatgactttcaaagcctacccatcacagattgctcagagcaagctgccgggaccttaatgactttacttttttacttatttttctggctcaaacttaaaattaaccagatcctgggtattattaaaaaacttagcttcagggcagagaaagtatcttagttagtatagtatttagtatgtagtctagggttctatcctcaaggccacagacactgggtgtaatgacagtcatgtaattgctgaactgagcaagtagaggcaagaagattcagaggtcaaggtcatgctcagttatgttgtgagcttatgagcatatgaacttatggccagcctgggctacacaggaccctgtttcaaaacaccagaaaaatgaaccaataaaacaacaacaaaagcaaaaaacatgaaaaggaaacaaacaaaaatttcacagtttgtctttagagaggatttgtgttttgaaaaagtgcctttgcatctatcatctgtctgtctgactacctgtctgtctacctgtctttctttcttccttcttaccttccttcttcctttctttccttgtttccttatttccatttcttctttccatctttctttccttccttccttttctccttccttccttccttccttccttccttccttccttccttccttccttccttccttccttccttccttccttccttctttccttctttctttccatgtatatgagtatgtatgtatgtatgtatatgtatgtatgcatgtatgtatgtatcaaactatcaataatctgtttatctatgcatctatttatcatctctctaccatctatctctattaattaatcatttatctatttatatgtctattaatcatctatcatctctatctctttatttaccatgtttatctatttatatatctatcaatcatctaatatctacctatcatctttctatctatcatctgtttatttacctatatatctatcaatcatcttttatctgtcatctatcttatctatccatctattatcatatatctatcatctatcaagaaatttatcagtatcatctgtctatctttctgtctctctgcatatttgttgacagagaaggagagagagaataggaatttgggggagctgattttgttctttcatgtggatttctgaattgaactcaggttgtcagtcttagcagcaagtatcctcacattttaagctatctcactagcctcaaaagagttttagcataaataatttttctcacaaatttccagaaaggatcactacaaagtaggaattccctggcacaggtcttagaggttaatgacttcttcagcatgtatcttcatataaattagtgcatatggactcagttacctgataaaaggaatatattatacctaattgatgatatcatggtaggtttcatataaagacattgttaataaaagactgtcaaggaacctcaagatgattttggctctgggtctctaattctctacatctctacaatcctagaactttgatgagccaacaggttctttaggggtcactggcagagaactctagagaattgtacttagacaattccattttaattttgagacagaaccttactatatagccttgactggtcttgaactcactacatagatcaaactagccttgaattcacagagatccacctgcttctgcctcctaagtgctaggattaaaggtgtgtgccaccgcatgccaagggatgtttctctctacaatactgtatttcaggaatgtgcattttgaatatcatataccatagaagcctatgcttgtaaaatcactaataggaatatgatatggcagaattttttccagatctatggtagggttaggactgggagtgaagcctgatggtagagttcttctctcgcatatataagatctagcgagcccaccttgttctctgcccttccccccacaccccaaaaaatccaattgtacaggatgagaggtgtgctatgtgttatgtgttgtaagctggaaatacgttgttgcctcagtttatcttattccctttgtactccacatggctgctagatgtataattttctcagtgtacctcgggataaacttttagggttttaattcaactgtagattgaactgtctgatttccttctatggcatcagagacctttcgtgttaagttatttctacctgactcctccatacatttcatagctgttattcagaaacagttttggaccctgacaatgccatgtttcttttcgtgtatattacttttctcttcttttcctgtttgcaatctcagttttcatgcactgttgtttttcgcttctaagtacaaagaagctgggctcaggagaagatgtcagcaggtatttccgttggaatggaagaggaggtcattagaaaagaatagtgcattctccttggacatcttgaaagacatcctgtgtttatttttgcttggtgcatcttttcttctttaggtgtaccttggtgagtgtagtctggtcttttgcttcttttagaattttgatcatcttgttgtcacttgtatcacatggatttttctgtttcattcatcagcttagagtttttgctaattattattattattattactactactactactgctactgctactataatctatctcttgtcctctacactttgttgtcacttcactaatacttttgagctagaaatctccttcacaaaaatgattctaagaatgtcctggagcaggtttataaatgtgctttccatgtgttaaataggtttgtggtacctccaggattagaatttactgtaaagaagaaattgaaggttcgtcttcaagggtttttcttattatgcaagtcaagctgatgagttaaagatttcaaaatccttctgacacattcctagtatagtggtgacatgcaccgttggcacacttcggatcgctattcctcctgttattcttaatcagcattctggcatctaaaattaaccatgtctacgaagggcaacaattacagccatttgtcttccaaatgagtcaacatgatttctcctggtagtttaggtttgtatacagagggcaccgcacctgtgtaaaaggtaatgggggccctgcaggcatacattgcaaagctgtaggtctttttgggtttgtgataacacattgtatttgtgagaaaagcttttcctttgtgatacaaagatgcattgcctagtaccctcttttgtaggttttcaatgaattaaattaatttaaaagaaatgttgatcatttttcatgaaaccctatgcaaccaaggtcattttgagtgtatttaaaccatgataatacatgctccatctgttgggcttcgggtcatagtgaaggatttctgtagtcataagagagactcaagagtgcccacagtgtgttgtgcttttgagaaaggctttgggtttgtggttctctctgtctcttatggtgttgtctttgatgcagctgcggttcattgttgcagaagactgtctttcactcatatccaaagtgataaacttttgatgaagagagggagaagaatttaatggtctgaagttttccacctgttcactgttattgcttgccttagaattccccaagtttctccacacagatctccatggaaactaagcaaataagccacttgaaaggagacaggttattggtttttctcattgaagccactgctagattttcattagttgtaatccattttcttttaagatgagacatacaggccacttcttattttcccggtgtgagtaaactgactaagttcactatgcaccctttagagatgggctctgaaggaaaaaacatccattttccttctgctatagagtcacatctgaaagcacagacaagggtaaggatgactgatgtcaaaggggaaaggctacttgtgctcttgaaaaatcaggtcattaagcaaaggaagcctgggtgtcgtaacaggctaatctgattcattttgtgcttcaggttctctcatgttaattgtattgagtttaaaaataatctaaataatccagagaagcctgtcccaggcctcaagtactgtttacaccttggtaacctgtgaattattcactgtatgagacatcagagacacctttactcctgttttttgtttgttttttgttttatctgtatgcatgcgtgcatgcatatgtgtgtgtacctgtgtgtatatgtgtattatcagagacagggttgctctctgagacttggccatcctggaacttgctctttagaccaggctggctttagagtcacaaagattcacatacctctgcctcccaagtgctgcaattaaagatgtacttcaccactgctaaactcatggacatcttttaaatcaaggggttgataaggctaaaacatgaacttcacaggttcgaacttgcattgcaaggaaagttttctctcttcctatcccttttccagtaacactggcaacagtgtttagattggagatttataagccaaaggaagccttcataatatgtttttaaaaatgattcaaaacttcagatttccttctggggctctgacaagttgaatatatgaggtttttatttgtattgaatttctaaaggcagtagagaccaacaggggtgccattgacaattaagatcacatgtgtcaccaggtgccatttccctcagctcttgctgctcagtgatcttcttttatggacaaagggcatgcagacatcaccatgttccttgcttccctttctaggtggctgtacttttgatgatgggccaggggcttgtgactaccaccaggatttatacgatgactttgagtgggtccatgtcagtgcgcaggaacctcattacctgccccccgaaatgcctcaaggtaagtcacattcccctaattcaatgtctagggaatatttccgaaaaaaaaaaaaaaaaacaaacaagattttttcactttacatgtaacaatagaaatttgttatattaagcttattaagtggtctatttggtcacatgtaaaaaattttaaaattttctttacaatattctataccttcctatattcttcaaaatttctgaatacaactttctgtgctttgcaaaaattatgtaagtttataaacattagctgtttttgtctcttaataagaagtcaaaatgatcaagtaaaacttattttgatcatttaaccaaatcatttgatcattgattcatgtcttatttcatatctttgatcatctctcataggtgtgatctagttagactctaagcaagcactagttgttggtaaggagataaatggtctcattctcccacagaccatgatgagccaattcttctacaaagagagaccttggagacaaaattatcaagccgagatgctttctgagtaaattttgtggatacacacagagtttcttactgatatagaacttgttgtaggtattgacttttgattttctgaggcagtatattttctgattgcttaagacaggtcatgttattattttattttattttattttattttttgtgacttgtgaaaagcacaacaaaatagcatatcaatatatactttccacttaatataatatgggactagtgtgtttttcagttctatatattagtttgaaactaactctaagttatgtgtttagtaataatttgaataattataagaatcagaaacgtaaacaccaaatttgaaccatagtacctaggagaacaagtgttgcttagcaagaagcaaatgattatatataaaattatgtatgtgtaaaaagataacaccctttatgctttaaatcatatagctgatgttaatgttcttcaaataatttcttttgaagtataatttattttgtattataattacatagagatagctaaatttaaattaagcatgtccttcatagttgactgtgagtttcagacattgccattggaagtgcaaatatcaattaaggtggctgattaagaaaccttgctagttaacatgattcataaacacaaaaggaaaaatcattggtgatgatcagtggactatgacaaggtctcaacgcaaataaaataaaactcaaatgaaagacattcaaatgagggtgcaaatgaattcagtgagtacgttttgtggattttttttttttttttttggcatggttctgttctaaggtacatgctgagtttaagccttctatttattctgaattgtagctttctctgtctgagttggtaaatggtaattttgagactacactaaagcatagttttcctcctggaggaatacaccgtgggggtggggtggggacagtgtttacttaactcccttggtttcttatgattgaccctgacactatgggcagactcacctcattttgtgcattggtctgtaatcttctttcaaaggtacatacaatatcattctggctctttctgattaaagaaatctctgtacgtttgtcacttcagtattctcagtggtatatttagacttaatttttcatgtaatattaaaaaggtgggctgcaatgcacacattttgactgtttatcatcagagaataatcagaaagatgttgatttatggaaatgttgccattactaattgctattgatggtgtgtaatgagagctgaagagaatgttcaaatgaccttgttggttcaccttttacacaattacttaatcatcggttacagtaaaggatgttatgcagagaaattgaaagtgtttgatattcattcatatcctccaattaataacacattaaataattaatcatgcaaagaagggaaaaggtcatggacatgttattattattttttattttttgcagaatgtaactatgtttagtctaaggaaacgtcaaagaaatacccatatgtattcctgttttattaacctgttttatatacatgtgattgtagatgtaggttcacatgcacatgtgtgtttgtgcatgtggcagcaagaggacaaacttgggtttctcttctaaggaatcttccatcttggtttttgagaccgaatcttaagatagcctggagcttgaagagttggcttatttagctgaccaatgtggattctcttgtctcacccttttcagttaggattataaactttcaagctttggtatgagcactagaaagaaagttcccatacctgtatgataagtacattattaattgaagtatctcctctagccctgttcagttttttataagatattttctccaattttcctgctaatatttttaaaagaacctactaagcattaatctgccaatatattggctaaaaggacataattagacatactagattttcatgatcttcctggggacttggctcagctgctaaaaacacttgttcttttagaaactagagtttcatgctcagcacccatagctcataactttttaccactccagttctaggatatctgatgccctcttctgacctccatgggcaccagacatgcgcatgctacatacacatatatgtatgtacaacactcatatacataaaataaatagtattttaaaaatttcaaatgacccatcttttctttgttcatacaaataggtaggcctacttactttatttactggaaaaaaaaaaaaacataagtagaaacaaaaccacgaagccattccatgccttctgtcataagaagtctgtctgtctgaggcagacatggtagtgaacctttcagtacttggacattgttaattagtgatgtcttattggccattagagggttaagaaaaccagaaattgtaaatattcaattctaaatactaagggaagaatatagaaaataagaaataatgtcttgtgacaaatatgttactattagtgactgcttgccacattccagaacagttcttagcttgttagatgacagtaatgatgacaagaaggaccattaaatgtttaaaaatagctttcagaagaacaaacacttcatgaatgagccctgtagcaaagtcatattaaaataggaaaagcttttcattaatgggatgcaaagtaaaggtataatgagttcagctgcaccatagtgacatcaggtgttgctgagaagaattgagaacaagaggaaacatctcaggctactgtagactcaacatctggatagccactttgtgcagcctaatgggcagccaatccattcttggatataagcccagaaagccatagccatgtattcattcaaagaatgcactaatgtatatagcattagttcttaatagttccaagatgtaagcagcctgaatccctctcagccatacagtgtaccaaagccaggcagtgtattcatgtagtgagatagatatgattccacaatgtgaaggaaccaactcatgctgtaatcagcaatattgatggatttcaaaaccatcatcagggagtgaaaacagacacaagagtgtttcatttgatgtccatacatttcaaaaataggcacaccgattgctgagttagaagtctgttagtgtacgtacttatgggagggcatggcaagaaggcatgaaagagatatctggatgctggatacctagttatttacctgggaagcatttgagctgctttcagtcaagaaactactgagttgtttgttttcttatctgtaacttgtaagttagcaaaaagtgacaaggacataaggctattgaggacacaagcatactattgagaagctagaataataattatagtgttgtaggttagcaaaagagatatgttccagaagacctcaaatgtggtagactctttattttcttccttctttggtcccataagccttgattccataaatccatctttgggctttgttcaggttatatatttatttctatttatttctatttgttgtctaattatccattcaccaaatcctcccccatttgtactgcatctacacatgatcatctgaaggaagcagagcttgctgactggcatggcactctttatctgactgcatagattgatagtctttcaatctactgtctacatatgtccactgaggttattctaacagtttcaatattattacatattttcccaccggactcataatgtcttcatgtacatatagcatggttaaaaatttcagtttctcaagacaccattttattttctttagataaaagaggcagcttttataacacaaggcttgatagttttttgtttaaggggctagagagatgcctccgtgagtcaaaatgcttgctgtgaaggtgcaaagatctaagtccccagtgcctacataaacagccttgtatggctttgtgtgcctgttaactccagaactgagaatggagccaggtagatcctgggaagttgctggcctatcagcccagctgacactgtgggcttcatattattactataaagtggagtatgatagaagataacactgggtgtcttcttaggctttctgcccaggctcaccctacccttcaacaccttacattaaataaataaaagattttgttcataatttgaagaaaaaattctctcttcttatagaaaacaatcaggtaggaaatttttgtttcttaaacattgtaatgagagattttagtgtaatcagaagattgtaattattcagtaaactctgcccttataagggatatcatctaattctgatttgtttaaatgtcaattattaggagagaattcgcactttctccaccttgcttgtcacatgaatgtcagtcctccacacagaaacctgttatagccatgcttaagacaggccagagagaatgcagatggcagacagagctagacattgttctttgatctcacacattttttttttctgtgatcttgatcctcaaatattcttttatgcttatgaccgcatgaaacaaattcatttctgcgtttgactatctgttctgttctagatgtgagggcgaggcgggaggctgacctatcattacatttgtcttccactgaaattgtaactgcttcttttgaagatgtgtttctctgacatgattaattgaattttactttagagtctgtggaatacctatttgacagtatttaaaattatgactacattagattccatcttcatcttgcttcttcctactgctaataatataaatcactacatggagtttttgatttaaattgtacatactgtatgttattaaaaaataataaaggctctaatttagattaactggaagggtgaaggaggaaaccatttctctgccttgtaaaacttagtgaggtgtgattcagtggcttatggcctgaatgtttagagagcagatgagacggtataagagagagttcacacaacactaagaaatcagcctttaaactggaggctgttttcttagatttcttgcatactctattagtcaggttgctaaaataatgctcccattctttaagtacttacttgctgaggttcactctgcttacatattccactgtactatgctcatctctcactgcggttgttatttccttctgctggtgggatgtagtgacaatagaaagtgtgatgtctacaagttaatgcacatgacagcattcgcagggaacttaacttctgtactcaatatcataactctaactacagttgatctgtcctggtggccactctgaggaacacttagaggctgaaggcactaaggtaaagtttgaaactggttttgctagctcaaacccttttgtacttccatgtctgagctaaaagttaactccagtgaatgtgtgtgtgtgtgtgtgtgtgtgtgtgtgtgtgtgtgtgtgtggtgttgcgggcatatacttagctacataatgacatatgttgaaggtcaggggtggtgtctaagcacatccttcatgttactgccttgtttaaaacagggtctctctgtttttctttttgtcagtctagttggagcatgcacttctaggaatgtgaatctctctgcctctgatcttggcagagaagccctgggatcatattacataggtttatgtaggtctagagatgcaaagtgcagtcccaaggctctcatgacaagtgttccacccttgagccttcaccctgtcttatatgatattttttagtcctcctgagagccctatacaataaatgatattgagattggtagagggcatcacttgctctcagatgaccagtgcagatcagtaacttgccacaggaccatcttgtttgtatttcattataagcaaactgacacctttccttgactccagcgtagatatttaagttcactgtacactgttacttatttgatttaatctacagtggtttttcttctgacgccctttggggtgaggctctgtcctttgtttcatttacctttatgttatttttagttatttgatgaacacttgtcgtgggtcatcctttggaaacatatcatccactgtgtcatgagaacacatgtgctagaagaagaaacccgaggattctctgagggaggctgagggaagtcagagtttgaaaatatttgttaaggctttgtttatagtggtgtattttaggacaaaaaattacaggcttctttcaatgtgctcttcccaactgtgtcgtcattatgtctgctggaacttttgccatgagcacagacaagagagtttaccatacttgagctgtttattagaaacaccaagagttggagacagtgtgaggtgagggagtaaaaggctggcgtggaacacttgaagagtcaggcaccaaggaacagctgctttttagtgtaaggattactatctatccctatgtacatcagtgcagcctgaagaatgtctaaattacagagtgaggaagtggcatgcggagataggactcttttcctgctatttcaagtatatgatatatctaagttagatatgctccaatatatcccataagggaacaacagtttagtattaaaaaagagggagagaaaaagatttatattgtgccactcctagaaaatgtccttttcaaagtctgtgcagctatctttaacatggaccttaaaatcaatatgtagtccagagaaacaaaattacctctcctgggatgagagggtgagttaagctgtggttatgaccttatattttatctttccgaaaataaacttgtatcttgatgctactgtgtatctgaagttgaacacttattagtttccaaaaacaagagggaccacatggaaataaaaatggccccatgggaacaagagacaaggaattaaaatagggatctttgtcaaactatatcatatcaatgctttcatcatagcattgaagtgatctgttatatatatcactaaatagcatgatacaaaatgttcatatcctctatagattatattcagaatgctctactgttatggaagactgttgaccttcaaacctaatttcatctgaaagaatgattgtctattttaaaaggctcttttctaatgaacaaattattggctgaggagcatttctcaacaaaatttgtgttttgtgtgttcagagcccatggcaactttgagcggtctatacaatcattaactccccacttagcaatgtaagacaacactggtggctctttttccagggcttggaaaaagcacatttaacaaaacagtttcagataattcaatagttgcttatgggtttctcgactctgcaccaaattcttatattttggttgtgagcccagcctttaacagctgagccatctctccagcctcacaccaaattctttaatacttgcttattaagtatgaagcagagttggcaattgtgtgtttgtgtgcatgtgtgatatgtgtatgtgaacatccttgtgtgcataagtacatgcatgagcatgtctgtgcaggccagaggccaatgttgtttttcttgttcccttaacattttagtttgtatatagattatctttcgtctttatggatatatcaataataaatatgatggcctatggcttaggcaggaaataggaggtaggacatctgggagataggaaggattctgggaaaatgccagccaaaaaagtataacaagacaggcacatgatacctgagcacaggtaactagccatttggcagaatgtagattaaaataaatggatcattttaagtgctgatctgatctaggaagaagaaaggcctagctatatggccaaggtatttggaattatattttgagtctgagtcttacttctgggagcctggggctgacagcaagagccaaacctgacttgcattagggttttttttttttttaagtttacttatgtttattttatgtagatgagtacttaatgcatgtatgcttatgcactgcatgcatccatggtcctcagggagcctggaagagggtagcagatcttttgtgcatgcttgtgagctgtcatgtggatggtggcaagtgaacctggcttctctggaagaatatcaagtgcttttaattggggagccatttctccagccttatcgtttttgttttcgagaaagtggtttttttttttcagtacctagagctcaccaatttggtaagcctcactgtctaccaagccccagacatccttctgtctttctccactcctcaacacaagggtattgattataagtgccattcaagggtttttgttttgttttgtgttttgtgttttgttgttgtttttgttttgtgcgtttgtttttttacatcttatgttccttggctactgaaactggatccttgtgttttgtggcaaacactctatgaactgagtcatatttccaggccttggtggcaaattgatattcaaaaagtcaattttacgtgtggttttattcattctatgccagtctctgtccatccacaaatttaccatgtagtctaattggtccagtttatatctcatgtttgagcgtttgtcaatcagcacggagacgagactgagttcctccctgctgaccttccatctgcatccctctcctggccaggatggagtccaggctgggtgccatgccctttatcctgatgcacatagccagacggatgttatcaggagagtggtggggagggcactgagtagaaaaggagtgggaggtgtaatggagttgtggtaaggcaaatatggaattactatttcaatacccctgtcattaaataaccaaccaaaactagttattcctttattaacgttctaagaaaacagatggaaacttcatacctatttcaagtacttatcgtatgtaatttctaagtgtaaacatagtctagctcttcaatcaagtcttaacacttgccaggaatcagcccgaattacttgagctgggattctatgagttagataggcactattcctggttgcataatggctgtattgattgattccacgtataagtactggttttgttcctgtggcagtcttatcattctaattttggtcagaatatagtactctgtaaaatgcaaatacttcagtagcacaattgactatcttgttacatttgtgacagtaggcagactctgatagcacatgttctgttaaacagcttatcacaggaaatttttgaaaaacaaaacaaaacgggagttgaaatgagtttttaaaaatttttttgaagggttatttttaaaaagtcaatatttcattaaggattaatgacaaaaacagcagagaccagttaaagaaaaacagaatttatctttactgtatacaaagctctgagctagatctctcatacgggtttgtagtaagcttatatatatatatatgtgnnnnnnnnnnnnnnnnnnnnctaggttcacttggtcaactcctgaacttatgttgaagttgtggttgtttcttgggtttagggactgcagtctgttctattaagtcagctctctgggaacagttaacacacggaacttgtctaacatgaagctcttcttcctgtgtcactcttttttttttttttcatttttttttttcattacgtattttcttcaattacatttccagtgctatcccaaaagtgccccaccctctcccctacccacccattcccattttttggccctggcgttcccctgtactggggcatataaagtttgcctgaacaatgggcctctctttccagtgatggccgactaggccatcttttgatacatatgtagctagagtcaagaactctggggtactggttagttcatattgttgttccacctatagggttgcagatccctttagctccttggatactttctctagctcctccattgggggccctgtgatccatccaatagttgactgtgagcatccacttctgtgtttgctaggccccggcctagtctcatcctgtgtcactcttaaaggagcacttcctgctgacaatagttgtacttttttttttttttagcattctggtttattcaggtaagcagtggactctttgtggctgtccaaagtacctgaagtcagacaatttaagaaaagttgtataagaaaacctctggaggaaaagatatataattaggctctggacatttagcattccaatgtgttaggagttttgtctactgaatttggcagagaagcctggggagtgactgcaggggtttagcccgtgactaacacagtggcctaagggttcaagaaccagaggaagaggctggagaaggggcaggggaatgagagaaaagggctactatcaagtcattcaactaggataaaagctttctatctatcaagtcattcaactagcataaaagcttttaaaggaagccaattacttcacttcagaactggttttgttgttgtttttgtttttgttttgtttttaaaaactggtcaagtttcatctttctcttatttctttcacactgaaaagaagagacttgattgaaggataaaggtgctctattttccttgcattcacgtctttaaaagaattctacttgctctcaaacatttgtttctgaaagtcagacgttcttggtccacatgctaacagtagtgagttttctgattaccctatcactagtttttgtgtgtgtttttttttttttacttggtttcggtggatattaagtgagcatataatttatactgtgtactactgctccatactcttatttccaatcatccaaaatggaaaaaaaagtgaaatatgttgtttctaacccaagacatgtagctggaatatagtgtccataatttaaaaaaaaaaaaaaagatgatcttgtcttggaaggaaacagccttcatctcaaagggatagaaggcatggtttatgctgctgtgagtgtaaatgaccatgtcctggcggatacatttaggtgtccctagtacagtgtttcaccatggaacactatgggccttggatactacaggggacaccttaggtcttgggttggtggaagccacaggtctaataagatgagggattcctcaaagttttattttgtgtctcagtcacaggatgttaggtctgacccagaggtgagtgagcacttcaggggtcttaaattgttcagagatgaagtgtaattaggctctgagtctgcagccttccagtctctccacaccactgtggttcctttcagggggccaatctttgcagacatacgctcattccagtaattttctttcaaagccccatgttaaaatattttctctggtaaacagccactacttttatttcaggattgctttcaaagaaagcttgctgacagtttaagaaaagtggtgttgagattttttttttttgtcacaggactactggagtgtgactacaggggttgagccagttgctttagccagtctgaacaacatagcttgttattatgtaatacatacatcctctttgtaatcactcagcatttcaaaatattgacaatgtttgttattatttcttctatttcttgttcctgtcccttcttcattgctggggaatgatcactgaattttgtgacatttttcttacaggatgctgttagctgtctttgagtgctactactcataacattatgtgtaaagtgaagctgtccatggcggggtacgccttcagtcccaccactcaggaggcagaaggagacagatctctgtgttcgaggctaacctggtctacagagcaagtttcaggatgaccagggctacacagagaagccctgtctcagacagtgggagagttaaaggacacagcattagtgacttttgttcagttgcttatggtttaataaataactattgactaaatagctcagaaccttaaaaaatgttagtgagcttttgttagcttccccccttcaatagcatgtatcagttatcttgctatcctgagtcatttgaatatattaacatattgaatgacaatattatcaaagacaaacttgagtattttagatcagggctttactttaatagagtgcaatataactgtaatggaagatcataccattaccccatggcttgtgtttatccattttctgcagactacttgatatctgactagtttactatggctaacaaagttacagttatattagcgacaccttgccatacagcaaggcaaatgattttgattactatagccagatttttcttttcaaggaaatgcattactagtgaaactgagaacaagattctttttagttggataccattggctttttaatcatttactccattttaaaatcagtgaagtcgaggtggactgctgcagtcacgtgccactatctgatgctgaaggtctcctttctctctagtcatgaaagtatagctttcttgtgcactcttagtgcacagcctggtgagttccttactaaaccaataatagtagtccaaagatgctttggatcttttagcttcatatctctgtgtgggaactggatagctgaatgagcatcatcagcgtagtccaagcaaggagaaacaagtgctgctttgaaatactcactgtccgcttgtatcagcacaggttacttatgtctggaatgattgagtgctgtaattgagtgaggttgcgctcactgcccatttttgatgtcaacattcctagtcccatatgcatcacaaaactcatttgatagtgatagaaaagctttaacttaccgaaataaacatactacatgtaagaggcagaccagagatcgttgctcatcttaattttactaaacaaatagtgtataaataacctggaagagagactagcttaaccaacatttgagtccagattctcttgtttggggtttttattgagacatttaacctttttgagtgtctactttgccataagtaaattagaaataacacagtttacatttgctctcttgttttgttatacccataagatttaaatatttgtgcagcatctgtcagcatctaaatgtgctgttgttttgtaatcaatcttattaagcttttcccctttggctccagggtgacatggagggttagtaatcttgttaatctgtaagaagttgatttgaattcctctcacttattctagcatagaataatgtccttgcccattataggttttcagtggaccattaggaattattttatgtccagttcaaacattatcctgtctatgtgatttcaaccatgtacaggcacttcagtctgagactcctaatgatacctggacatgatttttgaaaatgaggtggcagcttagtttgggtcactgaatctcttcatgaacaatgattttttttttttccttttatggactataatcgttctactttgctcatgtatttgtctgctgtttcttactctctccattaaagaggatgtctttctacatggtctctcctataaatctttcatttcattccccctacttctcagactacgagccacattcagagtttaaagaatccagagtctgtccttccttccttccttccttccttccttcctttctttctctctctctttctctttctctctttctttctttctctctctctctctttctttctttctttctttctttctttctttctttctttcgctctttctttctctctctctttctttctttctttctttctttctttctttctttctttctttcttccttccttccttccttccttccttcctttctttctctctctctttctctctctctctttcttttgctctttctctctctttctttctttctttctttctttctttctttctttcttccttccttccttccttccttccttccttccttcattcctttcttttttgtatgcaaaagcaaagagcgtttattcagctgaacttcctgcatgcaggggtctccccacttgagaatggagacctctggtgggtctacaggcccagccttttggcagttaagggaattccagggaggggtcgtgcccttttacctggattagttagctctatctcatcgtgtcatatcctaggcagtcctggaattagcacgacggcagaccaggctggactcaaactcacaaagatgtctgcctctgcctccagagtcctgggattaaagtcatgtgccaccaccacggggtccaaaaaaaaaaggcatttttattttgccttttgtttctcagaacatgtttgtgaggactataatggctatcatcatactgtgttagtcttacttggagacctgagggtaataatgtacaggtaaaaaaaaaacaattttagaaagagaataggcaaaaatcagaacttaacaaattattctctggaaaattttctccaaatgtattcaatgaataacatataagaatgtttgtccctttataggaaaagctaggaaactaggtaaattactacttgctatattgcatgctcacaaaggataattgttttgtggacggattctgtgttcttttgggaagatatttttctcagtatttcttcattttgtagtttcagcagaaaacccgtaaagctcaatttctttttcccttaaaactaatgcacatgtgaaaacgaaagtgatcatatagcccaggaaaatcccaaacaagtctaaccaccaggagcctaccattagtaactagatgttatattttatatcccaggaaaagatcacataagtctacaaaaccaagagtctatcccactagtatatggatgttgtacccaaagatctagggtaagagaggtccaggcagacacagtaagaagtctctgaaggagagattgcctggtactgaagaccagtcaggagacaatttggttgaaaggagacatttcagtaagaggtaatatcgtagtaatagtgggctgattataatagacgattctcaataatacttattaaagcctacaacagagtggcatggttggacttttatcctgacatgatcctaggtaaagaatgtgggaaacaaacactgggatggaaaagatgtgtagcaggaagcctgattagattactagaatccacatagggatgatttgaactagagaatacgatgtcatgaaaaaaaaaaaaaagattctacattagggtcaaatttttttgtttgtttgtttttgtttcttttgttttgttttttgagacagggtttctctgtatagccccagctgtcctgaaactcactttgtagaccaggctggcctcgaactcagaaatctgcctgtctgtgcctcccaagtgctgggattaaaggcgtgagccatcactgcctggtcaatttagtttaaagaaggattagatagtgttttgaaatgatttaagattaagattgtatccatggatgggtggtagtggcacatccctttaactccagcatttgggaggcagatttctgagttagagtccagcctggtctataggtccagtttcaggtctatacagagaatctctgttttaaaaaacaaacaaagatcatatttatggatgagtacagtttgttttatttcaccctactgcttggaaggcatcagtagtcatgagctgatatggcaatgggcgtggtcaggggcgatgtttggagaacaggggtgagcttttagagatggtacgttttaaatcaaatctgatatcaaaactaacctgctgcaatatgggactcaaggactcctattagcatgggctaactgagatctgttctaagcaagagcaagccaacaatccattagaataatacattacatgtcggaagctatcaattggcttaaaatactttgcagtgcaagtactttgttgaaatattttatttttattaattctctattgttgcatagatagtgcctaaaatgatttagtacagaaaagccaaggaatgattaaatgatgtagtaattatcagcgggggtggggggaacgtgggnnnnnnnnnnnnnnnnnnnnnnnnnnnnnnnnnnnnnnnnnnnnnnnnnnnnnnnnnnnnnnnnnnnnnnnnnnnnnnnnnnnnnnnnnnnnnnnnnnnnnnnnnnnnnnnnnnnnnnnnnnnnnnnnnnnnnnnnnnnnnnnnnnntcatattgttctcttgaaatgttgtcaggcaaataaaatcttccaagaattcaattatactgaaacaatagccacaagacatggcaaggttattgcagatgcagcagagggcagacagggaaaacaagagtttgtgctttgcattggtgctgtaggtcggaacccaacatttcagataacttacaaaggagccagacgcagcttaagggtaacgcttttgttatatgccatgaaggtgatcattttatcttttaaagcaataagctaacattacttttaaatgaggtgacttaactttccagtgatgagaatgatggcctaaaactaatttaacagtgatgatttgtggctggggcttttatatagaaaaatttgaccgtttctgtgatatatttgaatattaagctgaaaagtttggttgagtagaacattttcattgataacacccctttaactagaaaactgtaaacttgatgtgtttaattatcttcctcttaaaaatgcactccttcatgaatactgttgcaataaaaaaatgcttaagtcccctaatgacttgtaaaggaaaaaaatacctcatttaggaaatgaaaaaataaaaaaaccaaacggaaaacaaaaaactggagcaatagcttggggagcccttagctgtgctccctattttactattaatcctgtagctatgagcaactaatttaaccttctggaattgtttcctcgtttggataagggatggatcactctctgcagctacatcaataacagggatgccctggcggatgatggtgtttatttagtacattaagcgctgtgggtgggaaggcaggcactacactgtgaacacaagctgttaccaccgaaccaaatttctaagtgcttatttgaaaacatatttatttggggtctgttctgtggaggggaccaagtagcatgtccttgctggctgatgctaagccccaaatgcagctttcttttcttcctcactcgcgtgctctgttcaccagagactttgctgaaatgtatcacaggagatcagcaagtacctgtgcgtgttgtgtataataaagaatggccttcagaatggcgtggtttgctcttccacgaggcttttggcctctgaggagagatttcctattccttccttatctattttcactggactaaagtgctctgttcttgaagagatttcacagaatatttgtcagaataacagcatctctgtctttgaggcatccaccaaaataaagatttattcttaacatgtgcaaggagatcttagtgaaattatttcattgaaactttctaaagcttttaaaacaattgactaaaatttcacagtatagccgtctttttcagtaaatgtacactgagtttctatagtttccttgaggttcaatcttctaaacttgcttcattggccatagaatacaacctttcaaacaaccttctatggggctggtaggcttttaaggctgaggaccagtttaaatgttagtcctcccttgggatgttttatcctctgcagtcaagggctgcaacttggaattttcaatcagagttgcatttgaatgcctgccagggaatccaggcaacacttttctctgtgattttacctagcatgctttgatccttccttacataggagctctttattctcttttctgagctcttagcagctaaattgttctttggggacaaacctacactttgaaatcattgcagtttcccaagctgctcctgctcctagcccccaatgtgcatggaagaaatgattccgtaaacttctggaaaagggtgaggggacagtgaggtgggacatcagtgtctgaatgctctccccagagagcttttccccttgggaaagttccttctccatcttgaaggtgggaagcttggactatgaggtgggagagtttaagtagtgtgcaaaagccaagggctgtttaaagggaagtgaataaagtgtgctttgcagtttagctctttggtgactttttcttcctttggaaagaggactgagtagttttattcttatattctccgaataatggaaagcttttctggtacttgaattttaaagaccattattgtaggctataatcttacagtactttgaaacgagagaatgctataggacgctagcccaatttcttcaccttccagaggggggaacttagttccagagaggtagctccagtgacttggtgatgagcacagagtgtcaaatgttacaggcctgctcgtcatttctctttatttttcaatgcctaggagacttggaacttgtttaaaaagaatgccgaagcttctctgagagagaattagaatcactcaaagcaagcaccaagaagttggagggggcacaggtgaaagtgggatctgggtcattgccagcacctggccactcctttgccttttactgaaacattttccttgtttttaaaactagaaaaatagtaccccggagatggatggctcagacagctaatggcacttgctgccaagcctaagacctgagtttgatccctgaacacacatggtggtaggagagaaccagttcataggggttgtcttttgaccttcacgtgcataccagggcacataagcacacagtaaataaacagatgtgtgggggagcagatagtaagtagttcacacctcttttccttgccggaaattgcctgccttatacatgaactattttcctctttggtcatagccttgatcatttctcttcaccccagtgttccattcaatttatttccttagctctgctttgcctcacacttctttcttccagcagccactgtccctgcccattcccactagccttctggcttcgtggctaaactgcaggatcgttttacaccataatttcctgctttcaactcagtggtttacaaaggaagctcagcacagaagagacgcacttattcagctcacactagttttgactagaggtgggaaggttagtggctgcacatcagactcaaatctcaaaagttgaattctggagttgattctttaattgccttataaagttgaagcaacatcccaactcattaaagcaggaagagtctctcatctcaaaagctctcaactctcgagttgaatattacacctttttttttttccttaatggcagaaaacagtttccatttccattttattatctgctaagagacaggattgtgatgtggggatctgtattaatggggcccaagttaggggtttggttgatatatttaagtagttacagggagagatgctctctgttgctatatttgttgctatcttttattttaatatgtggcctttgacagttgttaatcgagagctccagcaaaggacattgatgatctaactttgcttcttccagaagaattggcatctacctgagatctcttacatgtaaatcccttgggctagtgtattagtgtggtaaagcatcctgagatgtttcagggtgatgaatgagtgagtactagctatcagagaagcaacactggatttggcccacctggtaaagagagtttagacccataacctgtttcaatgggtggttttacatagtcttcagttctaaaatcctgtgatactgatattttgtgattaagtgctctcaaaatggttaacattaaagtgaaagaagttgagggtaatatgggtattttggctttacctagtggcagcgttataacccctacagtacaggtcagcagaattttacctactgtgtctttccaacaagtatttactgaagctctctaataggagttagagaagtgagcaaaacactcttcatctttgtagtttcctccttgaggaaggtacaacaaagagatccaggtcaattcagggtaggttctgtttgggatgagtgtgtacttctttctatgaagtatcttcaaaacctggaccatcttcattgacataaattaagattgtgagaggtggaacccaagggagccagattcaggtaatggccaattcacatttgccttgtgacatgcatgcttgctaagtcgaacagcataaaactgcctccatgtctctgttcactctctttgggcgcctgaacttacactggtttttctctgtgtctaagatgattctagaacctccctcaatatgtgggatgatttctgtaaagtttcaggcttatggatgtagaattatgagtctcggagtgaactgactccattttatgtcaccttctttgggctctttatatattcagccactggatatttgtaagagaaacttgtgcttgttagaggtatgccaggcacttagcctgcttcttggcatgcatagatgcttagtgaagagaggagtttgtgaatgaacagaggtatactaaaaataatatttaaaaagtatataagctaactttactatacttcaaataatagttatggtgaataatttagatcttttacctagagtttaagagtgttaattacatcatttgcattagttgtaacagtcttggatagctacattgtttatggcagagtgaactataactctgagaagcactcaagaactactcatttctgagcttagtttagacaatggacttattccactactgacgaattttctgatagcaagggcttgtccactggatgtatattatagaaaggcttgcctgtctgccatccagaaaactctttccacatggctgacatgaacttagactaaatctgtctcctcagccagtatttgtaaaattatccagagcctagtgttaatactactcatggtgattagagacaagtgggtaaatatcagtattgtgaattcttcctaagagttgttaaaaatagcttagtcaggttggttaggccgtatatgaatcttatcaggtgttctatggttttgactcaacttaagtgttgcataagactattggcctggaaaacacccagttctcacctcgtcctcaccagaagtaccagttctgaaagtaaacacacatgcctgatagtgatagtatattaaccaaccaaatcaagtgtcatctaaaatactataagcagctgaagccaggcgcaacttccctggtttgggacggtgggagctgtttgaagtatttgtggtaggtaaaggtacctggtcactagctaaagaaaaatctcagctccacagttaatcagttaaagacattgaaagacttttaaccttatgaatgttgatttatcatttgaatggtatttgcattttgccaacaaatatatctttagttaaatattttcttaaatttccttttatacctacactagtgaaacaaaatccaggcacagatgtaattgtaatcatttacactttaaacccagaaatgactttaccactcctttgtttacttagttgtgtgtgtgcttgtgcctgtaggtcagagagcaacttgtatgcatttgttctctcctttaacacatagatttcctgggatccaactcaggtcaccaggttgggcacaatatacaatgagtcatatccctagtccagatacgactaaatgtctttgattgttggtaactgaatatatgtagaatattattaggaaaaagatacttaaaggttttgctattgccttgctctctttttgtttttggatgggacaaatgggagacagggtctcacaagacatgggtgtctcttacacttctaactcacagttatttttgcctgtctatgcctcctatcctgggattaaaggcatgcgacaccacacacatctggttgtgcccactttgactgcactagattccatagaatgcttcaaagacattaagagagaaatgtgaataatgcattagaatttctttattgtttgctaactagagttaatgtagataggtgttaaatattgaactgttttcaagtttaccagtgataatacaaacatggcactaaagctctaaaatcacttccggactgggaaaagctgtcgttactgatttgaacattgcagctcaccaactcctgtctctaaagcacagatttaaatatatcagagcatagaaaaaagatacataatattaaaatatttgtaagtctgattcaccccagtgtcaaagctaatatgcagaaaagaagctaagatgatccatgagctacgtggatgaccaggctgcacttacatatatgcagagagcaaatggaataataaataattgtttataggctttaaaagggaatatctcagtgttgacacttgcgtgaaatttgcttagttttgggagaagaaatcaataagtgctattaacttatagataaaactcagtgttactgagtttctttgcaaatactagtaataacttaacccagatgtgggttgcattcatgacagtacattgaaactttggattctaccagaaaatcaataatgtttttaattatatgttcttatatgttaaaaagcccaaacattgataaatgtctgtaattgtctgtaacagagataagatcaaatgtagataatttgctccttctaataggacaagataaaagattccattgttgaaaggaaagtggaggcagtgtttggaatgcttggtgtgtcagtgtctgtgttgaagaagttgcatagaggttccaaagtcttgtttcatttccaagtatagagcaggacaatcatttcaacagccttgacctatgttgtttagttttaattgtcagtgagatgcaatctattatcacctgagaagagatcctgaatgagcaaccatctgtcttagactggcctagaggcatgcctttgaggaattttcttcattgagctgaggtgggaagacgtacctaccctaaatgtgagcagcactatttcttgatttaggttctagactgatataaaggagagggagacttagctcagcacgaatgcctcctttgctgtttgctccttagtatggatgtgctctggccagttttcaagttacttctgtgacttcactgctatgatagactgtaaccccttattgtaacatgaaagatatatggtctctcccctgagttgcttttgtcaggggattttattataggagcaggaaaagaaataggactattattatgcttggaccataattccctttgttcttgtcttggggaagtcaagacacaagttatttttatttttgaaatgttgttccttaagagttgagggtgcaacacattctatttcatattaacattggcaaatagatacctccatttgattaaaatttgaatgaaaaattatctgaatttattccctcaattaaattcaatgttttcattattgaaaaggtatatgtattcatattaatactctcaggttttctctttcctgtgttgctattaagtggagggcaggatttgcctccaattgcagtgttatgttttctgatatagacccttaaatttttattcaacaattttaattgcctttcagtaaagttggaaattcagaagttctcaatctgtctttcaaaaatatgtaaacagcgtgagttctattacattttgacaaaatgctatacattttccttttgctaaatacttgggtttcttcatttcttgaagagttcagaatttcctttctgaatttatgaaggaagtcacagggagggtatgggaagacgttcttaggatcatttctagaattagtctagcatgctccataaaggaggtaggagacacagaagagtttaacggtggatcgtgagcatcagctatagccacagatatagaaacttatgctcttcaggtatatgttaggaggtggttattaattgaccttgatattatataatagcagctgtaatcagagctcaatgttctgtgattattttgtggttctgattgataaaaattaaaggagaccaagatgaacagagtgttaaaattctgtcttctctgcttatggaggtgtgaccctacaaacacacttctctttcctgaaatacagagattaaatgcagtgtacaaaccaagtctgttagagcttgctcctgtgaccttataaatattttggcactcaattgttagtattattattttcttcctgattgtaaggttgagcatgtcctggaaataagaggagttatattacttaaatatttttagatttatgttaaaattatgttagttttacaaaataaatgttttccagggtactgcccttctcaggagattgtagttgtagagaattcttttgtatttcctttgcaagcatttggtagagtctaaccctgaacaacagaggccttaaatcatggttgtagttacaaggaagtaagatgtgttcgttttggcatatgtgttggttgaccaagaagttctccaactttatatcatgtgggaacgtataaattgacctataacaatgagtattattcatgaaaaggagaagcctccctttaattctagctgaaaaatgaacccagtgccccatggaccattcactacagagctgctatgtggcctgtggcagatggcgagaaaacaaccacttatccatgtatgacagatttagctgaaatgcaaacatgaaggaaaaatagctttctcttttggacttctattaaatgttgaatatgttactcctcagggaaaactccggcactctgtcattacatacagattactttctattcaaagattaaaaaatactgtcttttaattttaataacatgaaaacattagaaattgcatggagaatatgtgtttttgcaaatttaaaacaatgtttccaagcaactgagatgcataacatttaaatactattacatatctggaaagtgtgaaataatacaatgtggttttccatgagacacctgtggcagtttgaatatacttgaccaagtgaatgatactattaggtgtggccttgttggaggagatatgtccttcttggaggaagtgtgttactgtgggggtagcctttgaaaccctcctctagctgcctgatgacagtctgttcctggcttcctttggatgaagatgaaggactcttggctcctctggtgtcatgtcttcctggacactgttgtgcttcttgccgtgatggtaatggactgaaatactgatcttgtaagctagccccaattaaatgttgtcctttataagagttaccttggttatggtgtctgttcgcagctataagacccaaacttaagacagcacccaatgaaggattttgagaaaactagcgtaatgtgtgaacaaactgtaaaatgaatcactacgtagataaaagacacgatgaaactccctaaaaagctaggtgctgggcagatgcatgaaatactactaagcctgggaagtgttgcaggaaatattaaaaaaggaactggcacatttctgtacttgtgcctctgccccagtggcctggccagccatgcactggctggcaatggtctacttgtttttatctcttggactcagagctccacagtctctccacagagctcactaggctcacactgtgaggtcgttaccatgccaaccccatgcttcaaatccctttgtgatgcacatctggcaaaccatgctttgtcactatacctttctttcttgaatccagatgagccactgcttgaaggaaaacacaacacaatcttagtccagaaacaatggtaactcagtctttgggtgcaacaactaaaacctaatcttgaaagtcttattaaaaatttgattcctctgatagtaaatccttgcgggtcccaggaaactctagctgctttatgctgtccctgtttcaatagacctaattctctcctgcttcctctcttcctccctccaatctggaagtctcacctactcgcccagtgattggctcctttattcattaggggattggttcacaagaagccacctgagcacgtgactcattccccattccagataacctctcctgggagagcagaattaacataaaattcaagcagcatagagccatccacaacagggaaggattagttcaaagcctgcctgggctacatagtgagttcagggtcagcatggacagtgtggcagcatcatttctcaaaaaacaaccatgaccaaggccaaggccaagctcactctgaagctctccaatttactactttttccaatgatataaaccagttgtctaaacattttcttgagtttgccaaagttcaaagtatttcagtgatgccaaggagaaacagtgtatagggacagataaccatgtggttatttctcaaagtgtgacacccaagttccatgcaacagtgactttagttagagtgtttagcttgcagtgatgtatggttctaaaaatcagaatgtgtgcatgcggagcctggaaacttccgtaccagataaccgtggaaacactagtggcattatcactccagggctggatcctttgggcacgtcttatgtacaatactctagagtggtttgtatagttatcatggccaggacaatatatatctgctccaagtagctaccatggcagatgtcataagtgtaagtgtaacaaaatagaaactcttatgcatgtgtgtgtctgttaatcttcctactttactttgttggtcttcaaatgtgaagtttattgtaatttcagaaacttctttttaaccaagatatgttgcttcctttcaactgctgactgaggatgcttgaaaatcaaagccagcttcttatttcatgttctttttttgcctacccatgtgctgaggtaacacattggatatttttgtcactccagtgaacaagagttctgtttgcatgatttatcaggataattatctgctgtaaaacagcagtcctggaaagacatctcaattccaggtagtccaccaatgacagcacagtatccatgagttattcctctgcccatagagaaagttttggaagactaaacttcccagggttagaagaataccccaacctttgctggagtctcccccttcatctttttcttgagtaaagaccactatacacagttgggttgtcttgcacaggtcatgaatgcggctaaattcttctagtgtcctgggtaccagaattgtcatagtaaagcgtgatttgcataggtcaagtggaattgaatctccgtattatctcagttccttgaagtttcactcaactattagatcactgttggtcttgatgcattttaatgcattctagcattagggtgataaaaatgtaagtttagctttgatttaggttcctagttttatgaaataagttttaatcagtgcaggttctttaaacaagcttgaccttagtgacataattttatcactatcgtggaagttttcttagcattggggagtggtggtggatggagaaatgattcaaatcctaaagagcaattcttaaaaaccaacatttcatccatttttaaatgtaggactctggtaaatttctagaaaaggatgctttgatcaaagtaatgtttacagtcaagtaagacagatatatacataaataatcgttaattaccaacacagtgtgatccccaacaagataattgtagtatggcactaaaatagaaacagtttattcctcattttgagaaataagtacagttgctcttgtgtatatgaatatttataattatttgagtgatgttgatctcttcttctggctacagagaacaggtagtgcataaatagacagtctggaaacattgtactgggagtggccagctatactgagccataactctcaagctggagttccccgttgagaccagattcccactgttcctgacttgtatgtcccctgcttatacctctttgtagcccctggttttgttgcccaccaaggcaagtaaaagcatctgagatcattttatacaacttgtaagcagcagttcataatcagaggttcatgaactcttacttcccttttgcccctgctccttaataccgtgagatcatgagattattaaaatgtgaactctgatccccagctgattaaatagttcttaagttatgcctacagaatggccatgcttgaggctcaggtttcccagtgttgtagcagctaactttgtaaattaggtagttggagatagaacatctttgctccttggtttaggttggtctctgtgctctgcctcatcttcctgtatggtcagctccacaggacttttaaaaattgtatctaggtatcctttccttctaattttaagctgtcctgatagctaaaccttagttttgccacaaaggccttaagtcctgtgaaactctggaacacatagttctacttcttcaaagttgaatgttgcctagagtagagctacaggatctgtgtgctttgctagagggatggtatcagagtccagagtcacagcttacaatttcaactcctattcttgttatctgactgacacaggacaggtaaacatccttgatacacctgctctatctgactagttcagagagtggttggttaaaacaaatctagtcagcaatgggagcaatggggatcaagagtgcccatgtaacagtacagaatggggtactttgagtgattggcccaaggagggtaacataagaaagctgaagagggccccaaactgtcagcagaaaacaaagcaaaacacaaaacaacatttatctgaagaccttgatgaaaattttcaccctcgctctcccttcttttcttcttctcttcttcctctcccaagtccttcctcttctctgtcccccctctcctctctccttccttgcctttctccatcttttcctgctctgctgcattcctcccttctattgtttcttccaggtcttgctgcgtagcttcagctggcaacttgaagtgtgacccagtttgctttcaaattcatggtaatctgcctgcctcagtctctctggtctatgctgccatgcttgacttgagaactcaaatagtcatctctagtgctgtgtttcctggtctatgctggcatgttgaagaggactgaggatctgaacttgggtcctcatgcttgtacttgacccacagagctatttgcccatcctgggcatactgattgtaataatctcagatatagattcgttgaaagtgactaaggaaaaaaagcatatccagttgtacttttcaattatgtatttcatgtagaaaaatgtccgtgtagagaaattaggaactttaatgaaagctgttacaaaacttgctttcaccttcccttttctgttgctagaattttataatatttgtaatgcacgcatgcatggacacatgcatacatgtatataagggtatagaaaacaaaagagaacacagtcattttttttttttctcctccatactcctcctgctgttacaggggacactatcatcctgagacggaagtggagcctgaaaccagggatgctgtgagaccctccatgggagcccatgcacactgcaactaagatctttcattcagacaattattaagagactcataactgagtggcatttctactgctgataccctaggcattgagccgattcacatccagagcaagcatttagcacaagattctgtcacatgatttgacatcatacaacttaatactttagaactgtgtatttctggaacttcctttatacttgtctactcttatttgttagctgtttatgtacatgtgcatactcatatgcacatatgtatgtgtgtgtactcctcaatgaaagtcaaaggacagcttcaggggcaggtctctccttccaccatgtgagttctaggcactgaactcaggtcatcagggttgggagcaagaaactgggggtgtagtgaggctctaagtcccacagatcttgcctagcctagccttggttttctgtgtctgtccccagtcagagttacctagaagacaggtgctaccaaccctctcagtggcatgtgagagtaactcactaccaaagaaatacaaaggtttctgagcctcgaatggtgacagggttcatggaaaccaacatggtgtttacattttatggtaatttagctagagtattttcatttgagaaataatgaagttgatcatcacctttacaggctcagaaaacttcatggattaaaaataaaaataaagaaataaaaaataagtgaaaataaaaactaatagtgttaagattgaaatcctcaaatagtaaacttcgatttcaacactttaaaattttatccagtttggacattctgcgtagaagattattctgttatttgattaaaatgcctgggcaagcagctatggcttgtcctctttcacttcgggacttggtgtagtttccgaattcaatggttctgcacgtagagtcagaaaactcatctatctatgcatgggactctcagcttgtatgcttcactaaggagtatatttaaatcatgtaaaataagagttgtcatctgttactaattaggtgtgatggctctgtgggtcaaggctgtcattgtgactgacaagacttagatttcaggcaaccacgtggtggagggagggaaatgactctttttttttttttaaagatttatttatttattatatgtaagtacactgtagctgtcctcagacactccagaagagggcgtcagatctcgttacggatggttgtgagccaccatgtggttgctgggatttgaacttcggaccttcggaagagcagtcgggtgctcttacccactgagccatctcaccagcccgggaaatgactcttgattcaagtcctaccttgtcctcccttacaccagcgtgtgcatgtgtttatttccccctctcccctctccctttcttcgttccctcccttcctaattccctgcctcccttcctccctctcttcttccctatcaatataatttaaaaagaggatacaaaggaaatatcagctttggagttttataaaaataatttaattctccagggcagggataaattcactagaaacatgctgtgatatgtccaattatttaatatttgtaaactatctgccaatggatgccgaccaagcctaggtaagggctgactgctggaagctgatgggagggaatggcaatgtggcttggactgggcatgggtgttacctcttcatctattgcttgtgatctagtcagctgcaacttctcataccccacagagaacagggctaatagcactctccattgccattcacaataacaagtaagtatatggacggcatatttctagctaccattagccattcttccatcaagtatgtggattctttctttctttctttcttttttttagagcatgggctgctacattttttaaaaaaaaagatttatttattattatatgtaagtacactgtagctgtctttagacaccagaagagggtgtcagatctcattatggatggttgtgagctaccatgtggttgctgggatttgaactcaggacctttgaaagaacagtcagtgcttttgcccactggactatctcactagccctggatttttactttcagtggtagaagagaatcaaatgaagccataacagaatgaatgtgggaatcttacataaacattcagtttgtaaggatgaatttaataagaatataattttccattgtggaaacagaaaatataagaacatcagtatgccaaaataaatagcaattatccatgggtacaagtgctttcaatttttctttgacagtttttaattttccttattttctactagaaaagatgatccttttaaaactatgttaagcattataaaactatgtaggtcattctaaacatgaagggttagaatatcaaaatccccctgggcagtggtgacacatgcctttaatttcagctctcaggaggcagaggcagtcggagctctgagtttgaaggcagtttggcctacaaagtgatatccaggccagccagggctacacagagaaaccctgtgttgaagaactgggagcatcatggggatgaagaaagaaaaaagaaaaaagaaaaaagaaaaaagaaaaatcaaatcaaatcaaatatctctcctctcttctcttctctctctctgtctctctctctttctgtctctgtctctgtctctgtctctgtctctgtctctctctttgtctctctctctctttctgtctctgtctctgtctctgtctctctctttgtctctctctctctctctctctctctctctctctctctctctctctctctctctcgttgcagtctaccttaggtttgtagatgaacagtgaacagagctagcacattttacattctgggatctgattcttttgctaccctgcagcaaactcaggcagcagctaatcctaatgtcagtagtattttcatatggaaattgctaggtgaaaaagaacaaaatcgggaaaaaaaaagtttcttcaccaaataatgtggaaatgtttctggagaatttagtaatgtttagtttcttagtatttacagtggctgggattttagactagggatttttatgaaattcttttcctggtttaaacacacacacacacacacacacacacacacacacccaccctattgtatctttaattattttctccttgagagatggtttttcttctctttttgggcactgtagatatctgctataggtgtttttgagtaatttctgttcctgtaagtaatcccaggaaacttcagaaaggaatggtaaccacatattagatagttttagtaaaatactatccagcttttgtccaaagtggtggttttcttctttgttcatcaggggataaatcatccatttttgtaccatcattagcagtgtttggtatactttaaaattaaaaatttaatcaagtacccaaggagctaaaggggtctgcaaccctataggtggaacaacaatatgaactaaccagtacccccagagctcatgtctctagatgcatatgtagcagaagatggcctagtcagccatcattgggaagagaggccccttggtcttgcaaactttatatgcctcagtacaggggaatgccagggccaagaagtgggagtgggtgggtaggggagtggggtggggagggtatgggggacttttggtttagcatttgaaatgtaaatgaagaaaatatcttattaaaaaaaacaaaagaaagaaagaaagaaagaaagaaagaaagaaagaaagaaagaaagaaagaaagaaagaaagaaagaaagagagaaagaaaaaaaagcttagccagtctggtgtttgcttgcctttctttaagggataaagatatcaagtgtcttttctttatgtgtttatcaactatatattgtcttcagtaaaacatctgtatcttggcgtatttttttaaaaagttttggcattaaaatactaagctttgaacttctaaataataagtttacccaacagttctgtatctcagtgtaatgagtaattatttacaattcaattcattcccatttatgtattgttaggttttaaagacttattatgtttatgtgtgtgtgtgtcaatgtgggtatatgtacttctgagttcagtgccccaggatgccaaaactatgtcccctggagctggaattatacgtggttgtgaacctcctgatgtagatgctgggaaccaaactctgaaaacttactctctgaaaatatactcactggccacctctgatccccctctctagtactttatttatgcttttagtggcatagacagttttagtgttttggtgagaaaatccacaggatactaaatgatccttaatttatatctttcactcattccaaaagtttattggctcattataaagattttaactgcataagcatttttatattgctgcattaccactgaacaaagtaaaatttcacagccaccagaaccatgatatgtactttttaggggtgctgtggaagcactgtactccctgagaactcgctgtgtctttacctgtgtgtgtatcacaggtaggtagggagaggcagaagagaagacaatcttcagaaggaatttcacagacaacaaacaaacaaacaaacctggaaatgtaagaccatgcacactttgggtttaccctgtagcaagtaagtagtgcagtcaagagatgctgagaaggtagtagaagggccttgacatggagatgttttaactatgttcaaacattgagtctgtatgcgcagactggagcagggattgacctaggacgtctgaacttcacagtggttcctttggctgcagaatggacactgaatttcagggacacagcatacacacatttatagacagcacactctcatgtatagaagcagtgccagtatttatgtatttattttgtcgtttgtagttgatgatttcctaacaatagaacttaagtgcgggctcagttcttaaacggtaaactgtgtgaagttgagctagattgcataaaattaacagggatggacctgattctgatattagcatcaaaccacaccctgatagcacctttctcacaaatctttccagtgttctttgcggttggggtgtgtgtttccaggaagtcctttcccatttccctcatggcctttgaaaccttttatttgtactgtgtaaacttcattgcctgatttctttttcttccttccttccttccttccttccttccttccttccttccttccttccttccttccttcttcctttccttnnnnnnnnnnnnnnnnnnnncttcttcctttccttccttctttcctttctggaagtatagatctttcagagaacaagatgtttgaacattctagccctatgtgttttgggaattcaggttggtaaattctaatttgaagatgagaattttaaactctgtggtaccattttagtaaggattaagtgagaaaaatgaactagcaggaactttcatttaatcaatttgacatgtgaaaattatgtgagaagctgatgatttctctgttgagatattttcttctgtaattttgaagtttaaaaatatctcatgtctttttcagttatctgttacacaacactgctccaactctgtatggaatacactgatgacttttccatcacacaggtctccctggacttgttccattcaaattcacagttccttttctgcatctcaaacacaccaagggcattacatatatcaagcaggatggctgccattttgcttttgtggatttcttgcgtgttatatgcattttattgtatgtaaatatatatcctatcatgtcaccaacctattttgatagagtcaaactttccttttattacatcaagtgctgagattaggttcaacaacgaaaactcaaggaacactgtgagactgtagacacccctcagcagatacttcagaaagacactatgatgtggtggccatgagtacttctttcctacttctgataatcagaacaagacagtttcagaaagtggatgcatactaaggtgtccatacattccttttgttgctaagataaataacatttactccctgaattatatatccttaaattttaacttaaaaaatatagatataatgagtatttttaaaaaagtaacactttcctttgtagttaaagaaaattcgcattcttactcaagttatgtactgaggagctatttgcattagagttggaaaacagaatcagaagtccctattggttcttcgcctgaagctgagcttcacaccataacttatttgtgtcccagacacaaatgccagtgattcaattagctaccattattgattcctgacctgtctttggtgtagcgctagacactgtgtttggagcagtagagatgctctgctgaggaggtgatcacacaggcagaatcattgaacagcagcagacaatgagaatggctactgttgtgctgtgtttccatcaggtaagctcagttttaaagctctcctctgtaatagaaacacagctgcactttccagttacttgtactcagatacaccaattctctccaatatagtatcaaaaataagcataaattccaccctggaaactgttaaaacattgtatgcttcaggtaacaagacctgagtttaagccctagaagccatagataaatgcgggacatgttgtccgtgtatatgatctccactctggggaggtggagagaggctgatgcctggactggcacactaccactcttcctgttagaagctgggctctagaccattagaaaatcctggctcataaacaagatgagtgaatccctagatcatgagattttcctgtggcttgtgcatgctcctgcacacacacacatgttcactttgcaaacataaaatgtctttgcttgcctttagaggaccactgattcactcattcttccacactcggtttgcttttgcttttctattcttcaagtaatgttccccccctccttttttttcctatttgtagagcttatattactagactcataataaactctttcccaactttcttatgtcctagggggcatgacagtggttgaacaatccctaaaatacctgctttagaagacccaggtgattggctggaatgaatgagggagtggtagaataatcaccaactctggactcagacggaattgtttttcacctcttgttttcacctttcatttatcatagatctgcagctcttagtccatttagcccaggaatcctggagtgaccagtggatgtaattctagagactatgtgatggtgggtggcttcctagacaaggcacagcagtattgatgggcacagagagaatgccataggacacatggtcaccctggcagttggcatggttggcttgattgtccagctcattcctgtaccagggcttagacttgcagatgcttccaaccttaagatatgtactgtttatttcaactgcaatttgggaaaacaacagttttgctcatgtgtactttgtcaagcaagtcaaaatgcaaatgtgggattggagaaatggctcagcagttaaggatgctcactgttcttccaaaggatctgggattatttccctgtgttcatatcttggtaaatcataaatgcttgtagttgtagttccaggacatccaattcccttttctggctttcttgggcacacttatatgtagacatataagtgtgtgtgtgtatacacacaaggatacatataaaataatatacatcttttaacattcaaaaacagtttcataattcattaaatattttccaacaaagcatttaccagctgaattcctgtttaaaattctttattcttagaatactattattcttagaatatattatgaatttatatataatattataataatatggaatttactagaataataatgtaataatgttatttttatagtgctaacccatatagattagtattctatattattctaaatatagcaaattctatcataattatttttgtagccttaatattctgaaaaactttgaatagttaatacaaataccaagttctaaagttactaatttataaatacttaaaatagtatagttaactgagaaacattctcatttcgttgaatttgtgccagtgtaaagtatatctcctatcacagcttgaggtagaagtgaaggttccaggagagagcacacagaactaagtaaccatatagataattcatgtaaacttatgataactcaaactctacttaatatcattcttcctttatatcagagttttcagagctctagaatttgtacatactaagttgaaaggctcattactaataactttagcaaacaagtcagaaagtaattttcattggtagatttgcatgtttcccaccatttcctttaggattacactagggagttttactggcccttccaaacagtgaagcactgtgagaatttagtgttagagaatctgggaaatcgggatgacatagaccagtgaccctcacccttcttaatgttgtgatctttaatactgttctttgtgttgtaatgatccccagtcataagatgatttttattgatgcttcattactataattttgctactgttatgcatcttaatggaaatattggatatgcaggataccggatatgctactactatgaaagggtggttcaataccccaagggattgcgacccacaggttgaagaacctctgacatagactaaaataacgtaccattctcctatgagttactagtcaggtattcatctgtgcagagtgcaagttagttgctgaagcctgtgagaaagttttctttgttgacgactggtgctctccttaggtctgaaaacactgactcaggacttttttcttaaactacctcatgcccacagggaattagctgagtacgggatcttgtacattacgaggctttcaaggtagcagcaataatgttttcgcatttactggatctgtgaggatgaggggactctgtaaagaactgctgttgtgtgaaggagtttgagagaaatggccacgcaaagcaatctgggacacaccctcagcttttgatgcctgtgtgaagagccctgaggcttgtggctctctgtgtggcctggtgacctgctaactacctacacagtctgataaagaactgagggatagtttttgctcagacaaaatacttgagacaaaatcctagccaccgaaagcatagatgaaggttgtccaaacaaatctattttcagacaatttaatttcacagccttttttgctcggctccttgataccattcaacccctgctccccaccctccacagcccttcccctgtcccactctacatgtgtccccacctactgctttctttgtcactatgtgcctctccaccatcttccttctggtcttattttggaagggaatgttgctgccaagtttgatctttggatttcagttaaaatcttcacccttggccagctagaaagatggtctaccttgcctagtactggtagtgccatttttgcttctgaaaagaaagactgaagccctgtggtggtctagttgttgcccccatgagacctttttttatacctaaggatatctttaggctccagatcagaagaaaaaaacaattgttcagagtgaatctgttagttaccatcttgtttatgcacttactcccatttttaggtatagaagaatatatttgttcttttccgtgttcccgaaagcaattttaggaaaaagattactgcgaggaggataatcatgattgtgttccaatcacaattagttccaattttgcctcctcagatacatatgcctgttgtcctgtcttgaaaattctttcatccccagaacacattgtcttcaaattgaatgctcatcgggtttaatgtacaacatactcaacagggaattttgggtttgtattggaggagataaatcagtaaatagcttcttacatttggtgtgtggattctctggggacagaaggtgaacatacttgcgtttcccaaactagttatgtgtgcctgtgagttcaagattaaatggtttttgtctagctctagacagagtctgctatgaggtctcagaaggcacccaagttgttagtagtttccgggtaacatcttggtaaaaaatgtctacaaggtttgaagttaaaaaatcttttcctctaagtttcgagctaagaataaatgccatttccatatgctctgtagcattgctgacacttgtggtggcaaaaaaaaaaaaatagtttctaattagtttgttacattttgtgttttattaattgcattagctcagtagaaagtaaatttgtcttcatttttaatttatactatgaatttacagtatttaaaattcctttaaaatgaaaattcttttattttcttatcatcacttgtgtgtgtgtgcgcacatgggtgtgtctgtgtgtgttaaatgctcatgttcaaatttatgtctgcctgcctctgcctgtggagggcagatgttcattttatatgtttttatctatcatattctactttatggtttgaggcagagtctctcactgaactctgtctcactgtattgacctagctggccagcaagcaatcaggacctgcatgtcttcctccctcccacctaatctcatttctggtttctaaggtaatacatcctggagtctagctttcaccagatgctgacgatcgcagctcacatcttcatgcttacacagcaaatactcaactcactgagtaaaattttaaaacaaaacccaacccaaaacaatattacagtatgtctgtcatttctgtctctatctccatctctctgtctctccctctatctcgctgtttctctctgtctctgtctgcccgtgtatttgcttccatatgcagacaacagatatattactgccaatatctttcatctgagaaagagattcatataccaaactccccattgtctttgagatgtctcaacagaacacatgcccctttccagatagatagatgatagatagatagatagatagatagatagatagatagtagtgatagtagtagtagttacggttgttgttagcatttctattgtttggtaaatttcttgccatctgagttctcattacccagtgtcttagttagttttgtattgctgtgataaagaccatgaccaaaggcatctctaggagcaaagatttattttaattttgaattccaggtaatagaccatcactgagggaagtcaaaataggaactagaaggcaggaaaagaagcaaagctctggaggaacactgcctactagctttctccctagagcttgctcagccttatttctttataccacccaggaccacctgcctagaggtggtaccaaccacagcggaatgcaccatcccacataaattaagaaaatgctctccagacttcctctaggtcgattttaggaggctttttttttttttttttttttgtcaattaacatgatctctccctgctttgtctccctgttcatgttgaaatgacagaagctatttagcacataccggacgaataaaaaacaaaataacaacaacaacaatgcccccatttttttcactaccttattgttctggctggttttatgtgtcaacttgacacaagctggagttatcacagaacaaggatcttctgttatggaaatgcttccatgagattcagctgtaaggcatattctcaattaatgatcaaggggggagggcccagcccattatgggtgggtccatccctgggctggtagtcttggattctataagaaagtaggctgagcaaatcaggcaaagcaagccaataagcagcacccctccatgacttttgcatcagctccgacctccaagttccttccctgtgtgagtgagttcctgtcctgacttcctttggtgatgaacagcaacatggaagtgtaagctgaatgctcttttgtgacacatacttaacatattcagcaccatgctcctgcaagttctggtggcttatatatgaatttttaatttagttctttagtattttaagttgttcttttaattaacatgagccagccatgttcatttctgctaatgaagtttcttcttcatgtaggtcactgtgcaaaaggacataatgggggacattgacctttaaccatgtcaccactacatttggaaaattatacctggtatagtaaaagttagagaatgtataatttttttgttactgaaaaatgtatgtaattggatatgtgaatcatggagaacacaagactggcattcctcaaggtgcagaagggacatacaggatttccatagggtgtgggaaatggaggctcttaagtcatggtcactgtatcttgtgaggtctttctggtgatatgtggcaaagaaacaccaggactgacttcattggtcttacatgtgtgctagtcattcagtaattctcttcagttcacagaattctgtggctcctctctggtacatctgtgttactgctatgtgaatgagccctgtctggctgtggcatctgcagagctcagctactgcctgtctgaaagttcttaatcatttttatttttaggttgtgttgttttgttttgttttgtttttgttacacagttttgggggaggtaccatgtgctagaactacttctaagaaaataattaaagacatagtttctctggacagaaatttgatcctattctttgtgtttgatatgtttttatttagttcacgaataataatggatcctggaagcatgtatctaagtagattgaaaggttcgaaaatcaaattttggaaacgatcgtttacctcttccttccacagaagaaaggctactgtcttgaggacagctaagtgaccacatgggcttgattactgaccacagagccaacaactgcttgttttggctgcagctacttctattttagctttgacagtacaccccagagacaaacttaaaaaagttagtgtgggaactgaaaggccacagtttctcattgtttgctctcacccattgagccctaagtcagggtgtatgaaatcacttcacagtggtcagcacagcaaatggacaaggaaagctctggtggggggaggggcaggatcaccagcatgccacctctctgattctgttaaaaaggaatgcttatcctttagcccttgtttggtagagaaagtggaataaactgtcctaacaatggcttagcctgtccagcttttcacctttgaacaggtttgcttatgtgggtcccaccacccccttctgatctacaaaataatagatccacaaaggtagtagtgtaacctgtcccagaggactgtaatctgcttcattactgtgcttctctgagacagtgggagtcactaactcttctggtcttgccttaagttaatagaggtttactggagtgtgggcatcttaggtctcatcccttactcttatgtgtgtgataggtgtatgtgcttgtatggatgtgtgtatgtgtgtgcctacatgtagaggccagaaattaacgttgattgtcttcaacagtcaccattttattttttgagagaaggtcttttattgaaatggaagactataaatttggctttgcaccaagaatcactatgtatcacccccatcctctctacccatggcatgggggttagagacatacaggtccacacttggcttttatgcgagtatcctgaatctgaactcagggctccatagttgccaggcaagccctttgcagattgggccctctcctcagctctcctgagggggattatgtatttatatctcataggtggcaagcttttgaggtaacactggtctctttggcatctttatttatcgggacctttgttctctttctcctgttcacatggtttatggagctgctgttgttggaggttgacacagaatggccttattgcctttgtcatgcattaaaatgtgtctttgttttatcttctccaatttggactctttagttctccattctcagtctctcatttcttctcattcacttatttatttatttgtttacttatgccatttacctgtctttggcctccttagacagggctgttaatcttagcaagtgaacaaaatcttggttaggcaaattttgcaaaatatttttattttaatgtttctacttccttaaaattcttaatatgatgccgcccgcttattctcttctccataatgagacatgatagagaggcaggggtgagagaatgactggaccagttatgatctgtcagatctatcatctatctgtctgcctccctgcctgtctgtctgcttccctgtctacctccctgtctgtcagtctatctttgggtaatagtgggatgttcagtgcatgtgtgtatatatatacatgtttgcatgtgtgtatgtgcaagggtctgcccctgtatacatgtgaagatcagaaggtgacatcagaaactttcattgctctttaccttattccttgaggtagagtctctcattgaacccagactctctggcatgggagggctagcctagcatcccctttattctaggaatctactatccctggtttccaagactggattgacacaccacatccagcttttttacctggcttctggagatgtaaattcttgtcctcaaacttgctcagcaagtgctgtactcctaaagctgcttttgaatcccagttcttgaatttttaacatcttcagaaacaggaatttggtcccttaggagagtggtgaaaaaactgccctatctgactcttttttgaattatgctcctttgcaattaacaatttcctgtcattgaataaaaaaaggaagaaatttctttactcagttacctctgctcctgtaacctcatccttcttgaatctgaaagctcagctgggaaactgttcaacaggagttcttctaactgatccatagcggcctctgacttatgcagagtagttgtcatcattacaatggttagaactgaataactcgtagcagctgttcgttttgaatactaatcaaggcttagtttctctcttagtacatttgaacagagttttcgtgccttcggatataaagtgtctacttagtagaagatgttgactttagagtgcatttctagatggaaagtgaggaagctgcaggctctcttttcctggccttcagctctggctttctttatgaacaatgatgagctacatcacagtgatagactggagttgtttcagacagccacttgccagagactgcatgatgcatagccctcctttccttgttccttctcttctggtttctgtgaaaagacaagtagggattaccaagctctctgcaggacaaagactctcctgcgttttaggtaatgcactataattattccctctcaagttgctttttatgttagcagctccttctcgaaacgtttcagtaccactttacaggaaagatggcagatggagaagcaaaggcgagaggcaggtccacagagacgggtgaaaccatagagcagattttaaatttcagtgaatcctttaacattggtgtgtgtgtgtgtgtgtgtgtgtgtgtgtgtgtgtgtgtgtatgtctctatgcgtgtgtgtttgtgaaacagtgtaggggaggagtatcctaattaaaaaaattagagattcttttcagatttcagattggaaaatcggagggaaaaggagcagtttagaagagaagaaagagatggcagggagtgttaacaggatggcatcacaggacaggggtgtggagggaaggagcaagaaaagaaagaggtgggaaggaggtggtaggatagatgagaagccagagtagcgagggcaaggactgagaaaggctgtggtaagttatagggtcccgacgtttacaagcattccagtgttaacactgtcatctcagttttaacctacgaaaatgtttttttcacacatgtctagttggattcttcctactatatcatacagaacggagggaatctgtgcaaagaaaacatttcactatctcattcggccctccaaggcagactgcatcagtcagcccccttgccagcctcagagaagcaagaggattaaggcagggacagggcaaactatttgtgtggggtgaaaagctgggtggttgtgcactgagtgcagaaatcttaggccctggtaagaaagcaaagtggataatgtggttacacctctaagtcagacagtgcatgacattacccactttactggtcatgttgctttggttttctgtgccatgcagaggaacacagaaattttatgaccaaagaaaggtccaagtgcttctctctcaacctgccacccgccaaaatgtatactagcaagattaagttatagaatagcaaatctagattaaattatagaatagcggacctagtctttaattttaacctgtatcagataacttctatggaaacttgactcccgagaaggaaagatccctctaatcaagtttaggaaatgtctttggtttgtgtcaatcctctctccctccatctctctgtcccttcctcccttcctcccttttgccttccatctcttcctgtcacccttcaccctattctttctgcttctctactagtatatgaaaattttcctagtcatgatctgaaatcaagatgtttttagttttcaactataaatgcaaagctcttctcagggcattgagagaaattttatccagaagagcatcattgaatcagttatgattcctcaaggtcagaaagggagcctaaatattgggagcctgaaggtgtcagatctcaaattcttgaaaaatgtaatttctgttcttttgtgttggagattggagtacaagttgctttttcttatatgtctcattctgcctttagaaatgatggagtgggaaaactttattagaagagaaacattatcttaaggcataatagaatgtgcaagcttgaaaaaaattaccagtaggccatgttcttgctacgtaaaatggaggttctgtagaagttaattgtaacttttacaattggagcaattcttcagattgcgatacaggtcattttaaagttttcaagtttttctttttgctgattctataaacaattgttattgtttcccacatttttgcttgtatttgggttatgttcctcaagtttttagtagtcatccccttccctgcctgctaggggctgagatctggacaaaagtagtttctgttatatctggtggagggtgggagggagggnnnnnnnnnnnnnnnnnnnngagagagggaggaagggaggtagagaggcagagagggagagagggagggataggccaaaccaagaaatattttttaaacttgattagagggatttttgcttaatgagagtctagttttcatagaatttatctggtacaggttaaaaataaaaaaaaaactggagttactattgttctataatttaatctctctaatcatatttccgatatgactaatcagagaggtcacagtagtgagcaaatgcctaattttgttatatataacagtttagctgcaggttgaattctctaaacttcattctggacttttgggcagataatgtaactgtaatcccaacctttcttagaggttttcaatgaaataagcaaatcagttaagttcagtaagagacattggccgtgaaggatgatgcctggtatgttagatggacacatagactagcatctcattagatgcaggcaggctgtacccaaagtttgtagtgaagaaataaacatgccaaaggaatgaatttcaagcaaaataaaatccagtttggaaagagtgagacaaacagcaggttgggatttttcttcagaacagaaggaaaccttttgtatctggagactgtaaatgaacaaagaggctcgagagaacagttgtggattgtggaatcccagccatgaaagagtttggatgacacttttactgtaatgtaaggagaaggaaaagttcattgtaacttttaaaagtctggtgacagtcaaaaaatagcgtagggcggctagcatggacatcagtaaccccattaccataccattctggttggttgttatgcgtagcatcagagtctggtagaggtagtgtactggctagctttgtgtcaacttgacatggctggagttatcacagagaaaggagcttcaattgaggaaatgcctccatgcgatccaactgtaaggcattttctcaattagtgatcaagggggaaaggccccttgtgggtgatgctatccctggcctggcagtcttggttctataagagagcaggctgagcaagccagggaaagcaagcaagccagtaaggaacatcctttcatggcttctgcatcagcttctgcttcctgacctgcttgagttccagtcttgacttccttggtgatgaacagcagtatggaagtgtaagctgaataaaccctttcctccccaacttgcatcttggtcatgatgtttgtgcaggaatagaaaccctgactaagacaggtagtgagcatgcaaatcagggttgaggaatgagcttgaagcaattggtggtgaatttcatgagaaaatcaggggaatggggaaaatcaatgccgttaatgatctgagttttactccctgaagtattacatatccacttagataaaagaaggtgatggggaaagaggcttaatcaagaagaaatgaaaagttgcaaaatataaataatatgttggctttgccttcaactcaaaggtgatagatagtaacaaatacatagagagattaatttcaaacaaagaatcatcctaagtagactggcagccaaatattggcttctatttttactccaaactccaatactctgtttagtgtctgtgtgtgcgcttgggcatgtgtgtatgcacacacacacacataggaaattacacaggtatgtgtacatgtgctttatgcattcatgcatgtgtaggtacgtccacctgtgcttgtgtttggggtccagataacgatgtctactgtcctgctctgtcactctttacctaattctatcaagacagggttatactggttgatcagtgagttctggctttcccattgtggcctgctccatcagtgggattgcaattatatctgaagccatacttttatatggctctttttatatgggtgctggggactcaaaatcaggcccccactttcaaaaaacaaacacctttatgcatttgtcttagtcagggtttctattcctgcacaaaaatcatgaccaagaatcaagttggggaggaaagggtttattcgccttacacttccatactgctgttcatcaccaaggaagtcaggactggaactcaagaaggtcaggaagcagaagctgatgcagaggccatggagggatattctttactggcttgcttctcctggcttgctcagcctgctctcttatagaaccaagactaccagcccagagattgtcccacccacaaggggcctttcccccttgattactaattgagaaaatgccttacagttggatctcatggaggcatttcctcaactgaagctcctttctctgtgataaccccagctgtgtcaagttgacacaaaactagccagtacagcattgaattaactctgcccagatatcttgatggttgttttttaagcttcctaggcatgaaactattattgtatgttgtctttagtgtcttgcataccagctttctagtatttattttatttataccaggaaatctaactgaataccaagaggtgacttttcactgctttggtgcctctgtagctgttcacgggatcctaagaatacacaaaagtatgtgtcttattagacatgaagagaatttatttttccctacactcctctccttaggaacaatgtgagtctctgatggttggctcctagaatggaatactccctttgctgaggttatctgttctcttgcatatgcatgcgtatttgatttcaagttttccaggcctgtttgtgtctgcttgtgctcatcacttgaagtgatggattgaagaaagccgatacatggaagcctcatctagcacattgaggatctgaatggaacaaaagagagatcactctgcatctcttggctggaatacctgtcttaccttcacactttgattagattggaaagcatactgtctataatcccgatttgtaggctcagtctaaactggaatttctcctagtgacactcctctaaagaccttcaggcttaggcaaatgctgtactctggctcttctagtctaaacttttagaagtttcataaaagtcacataagtctattttcaaaagtctttgttttctcattgaatataaagagatatagtatgagagaatgtgttgtgtgtgtgtgtgtgtgtgtgtgtgtgtatgtgtgtgtgttgtagattcatcttttgctcttttctgtccctttggagatagttaaaacaccttttgttcatacaagtgcagaactacagaaatatttagcttgtttgatttttaatctccagatgcccaccactctgtttaaaagttttagttcttagtgatctttctgtaacacatgggatgaatgaatgcaaatagactcaatagagcactaatgatgttcatgttggagcaggaggaagaaagaactccacatgtatttagagacattggtttgatgaatatagcttaagaatcactctagaagactcaaagaccttttcatcagactcatggcagcggattaatttcccaggagcactaacatgtttttcctacctctcattttctcatgagtatatactcagattgaatgaagatgtaaaaataggaatctgagtagcttttattaagttgaatactattatttgaaaaaataaaaacaatgccaatctttttggtattatttttcataggagaaacctatggggctgttgattgataaacaaattagtaattattttacaggtcttattttattttattgacttttgtggttggtttgttgtttggatacttaaatcagtagaagaatatctgcctgtcaagtccagggccatgactgtagtcaaacaaggaagaacaaatacatccattctcagtctgaatttcttgtaacacacggattctccaacttccaaattccgtgaccctttattacagttccttgagttgtgctgatgccccaactataaaaattatttttttttgctgctcatataattttgctactgttatgaattgtattataactatttttggagatagaggattgccaaaggtgtcgtgacccacaagttgggaactgctgtcatatggtgttgacagaacttagaattgatatactgtttgtttgttaatgattggtgaattaaaccgtgcgcctgtgttcctgcaagctgcgtttgttttctctgtccacctttacacaggttctgggaattgaactcttatctctaacctcttcccactgagcctgctcactgtcctggtaacctcagtatatctaatttgtataggcattctgaaactaaaaaaaatttaggatctattacttaaagcaggactttcatatagatatgttgctatatgggtaagtgtaactctaaaaaacctgtcaggttcataccttcaaaccttgcattattccatcaaataattctttctctgaaccacctaagtcaattccaattacaggttgattttattgtttctacagtttggagtatttgttggttgactgttatggtcaccttgttatccagtcaatcatttaataattgtttataaatatttaaaacatttaaatgtatagcatgctcttctagatgcacacttgttgggttgttgcatatcagtagtttggaactttagaattccaaatgcatggtttattattgctcctgtgatacatttctgtttagtagctagtatggtgtcccctttcatgcttgaaatggcttcttttctttttctcttggacacaacacagctgcttgtgttacgtggataaaattcatacagtcaccagtgtgctttcagcccaaactgtgtctgggttaccagctacactgtcccttgttgctggtgaccatttcactttgacattctgtatgccctgcctctcgcactctgttgcccaggtctcgtctttgcttcttttgcatctgtgtacccattacagcctaaccagttcagggaatgtcccagccatcccaccaaaccttttatttgaagagctgagtcaaacagtcacctactcactccctgtccccacccccatgggcagtaggttattttaaggttttctttggaactttttaaaatttttaccttcttctgtgtaacatttctctacctaatgcttttctgttaaatgtaccacctggtttcacccttaggataggtcagtcatgtgagacaatgctattttttttttaattaaatatatttgtgtatttgtgtgtatatgtgtgcggcagtgcctgtgcaaatgcacaggtcagccagagcacagcatgtagccgtcagtctcctctctccactgtatgagatctgggattgaactcagttcttccggtttgggagtaagtgcctttacatcctctgctctcaaggtggtggttcttgttattgtcttgatggaggatagcccttataaaggattggcatggcacttaattaaaatgtgtgtacaaataccttataatgaaacaccagagtcaaaaattcacaaactatgagcctgttctgagaaaaactcttgtatgtttttgtggggaaaaaaaaagttgacaggcctgtcagattggggaagatggtctgtagaagagggagtgggaggtgaatggctaccagtcctttcaatcaagaacatggataggtgtggcttctgagtttatctcttaatttgtaaggtgtcttaagtactttgaataaccagcttagtgaaatactatgcttgcatgccaaagtctgaaataaccttctatgttatgaatacctactatgaatgttttaaatgatatttttaatgactatatcattgctagtcatactcattatttataactactaattgtatattattgaatatgtagaattcttttattttttccattttaatcaatataatgagatgcattatcttttcagttatatctttgttaatttacacaaaactttttttcattaattaattttatatttttcactttatatctctcactttatatcacagtcctcccccacccctcctaggtccacccttacaaatccttttccccattgcccctccccccttcttctgaggagaaggggaagcatcctgccctcccccagggtaccaccagggccctgggacatttagtaccagcaagtctaggtgcatcccctcccagtgaggtccaactcggcagtccacctgtggaataggatcaaatggcaaataccagaatcagagacagccccctattccattgttaggggactcacatgaataccaagctgcacttatgttacaaatgtgtaggggcctaggtctaacccttgcatgctccctgatttgtgattctgtctttgtgagcccccaggggcccaggttacttgactctgtagttcttcttgtgttgttattgactcttctggcttgctcagttctattccactctcttccacaagagttctggagctccacatgttgtttcctggtgggtctctgcatctgcttccacttgttgctagatgaattctttcaggagcaagttgtcctaggtttctatctgcatagcaaaatatcattaatagtgtcaggagttgactcccttgcatgggatgggtcccaagttgggccagtcattgggttggccattcccccagtctttgctctgtctttatccttgtacatcttgtaggcaggacaaattgcctgaaggtgttgaagttttatgggtgggttgatgtcttcctccctccactggatgtcatgcctggctacaagaggtgacgttttgtagtgcatatttatccattttgaattaccacattaggggccatatatgtctttcaaggttttgcttattgccaaactgctctctagaaagttgcattacttaaaaaccatgcaaagacttaagtttaggcactttcccttgactgatgaattggagaacctcaagcaatctttccctcaagttatatttagggaagtataaatgtgtgacttgacatcattaaacctttagatagctaagcctccatcaaatactactgaacacttactagaaatttgagggaacaagaataacagtaaataaagttttgtttttaacatcaagagtgagggacttaacatgtgtaaaatttccagacattaaatatagagggccagttgttcttggatattgtagaagtaatcttttgaagttcctaagaacacagtgctggctacatttaagttgatggagggaagtctgtgtcccagctgcagctccacaggcaccagctgtgtaaattgccactgtatcaattctgtagacagggctggaggttgttcctgcttgtttctcctttgtagaactgcgcggtaagtgcattattaatgcacataactcagccaagggagccatggagggctctgtgtaaataagactatttatcccaaccattccatagaagtgaattatcagcactaatttttcttattatttaacctgtgttgagtggcagtaaaatgctgaaatagttaggataagcttttatttcatgattttcatctttctaatgatcaaattggtaagaactaatgatgactagcgcttgttcattccatttctttaataagaaaatggttgtagcttaaaatgcaaatggctgaaaattgctaaatggtcttaatggtaaatataatgcatttttaaaatgtgacacaaagcatattttactccaaacgttattttatgatagtagaaaattactattaggaagctaataagtcttttgagctctacactttaaaattggtagtcagaagctaaacttatggaaataaatatgccatttacttataaaattattcatcattgggtaaacaggacacagaaacaggccagtaatgatgcttatagcttttttagggtctcaggcctggtcatggtcatcacagaaattagtctaattcaaattggcacactgtagaaacattttgacagcttagttattgatgttaaaaatgtgagaatagccatgaataaaatcattctttttttcttttttctttttttttttcttttttttttttttttccaaattaggttaagagccgggaaatcttgttttgttttgttttgtttttgttttgttttgttttcattttggaagttgtttaccaaaaatacaccgatgatctttttatcctattaatgtactgtctgtgagaatcaagctaaaatgtaatcccagcacttgagaaacgaagactgggagacacaagtaaacaataacaggaattactattaatatcgtatgtgtattctgtacttgactgtactgaagtactagaaaaaaattgtcataaaactttgggatcaaaaggtcccttctaatggcaactgtccagattgaaaatttgatttcttatgtagctgaagccttcctctctgaagtatttttgtgttctgtctgtttgagctccaggttgtcaattaactgagatacatagacacagtcactgaggtttttggatatcgtggtacaatttattatgtttcagaatagaatatagaagagtagttttgcatttcaggaagagagggccaagtgcagtgtaagaaaccttatataaaaaaaatagctctctaatatgactcctaatgtcatgctgtttgacaaaatgatatcattacatttttttggaggttcacatatttattcaaatcttctttgcatgagaataatagggagaataacagcatgtctttctggagagctgcttgcaatagtatagtagaccagtgccagcctcagtgaatagtcactgtatgaactttgcccttagcaaaaccaaaaaaagtgttggcgttctgaaagtaggattctgactgtgtcatttacctcacaagatccagaatgagttaatggttactcagtcaatgtgacctcgtgcttgcttatgtcctgctttagaggagcatggtggtcagtgttaactgcgggggtcagaagtaatcttaccaagatgacagttttgagtcaacagtgcaccagctatgtactagagtcaaattaagaatagttggacattagggggttggcaagatgtctcagtaggtaaaggattgataccaaatgtgggatcggagtttgattcttaggtctcacgtactgaaagaagactaccaattccctcaagtgtctgctgacttcaatcatgtgccctggcatgcatgtgtcgacttgtgctctctctctctctctctctctctctctctctctctctctctctctctctctctctttctctctctcatgtatatcacatgtataaaattaaaatatttaaaaatatagaatgaaaggaaaattgaatagtagctctcataaccactttacaaagtattcttactccataacttgatgttctcaggacttagtgaatggcaaaagtgcatatgccttaaataaacaaaaatattagtatttgaagttggaagttattccacttcctgcagtcttccatttctctgctttaacatttgtgttaacagagaaaacaaaagaagaaagtactttctgtgcatatcaaaccaatacatttacttgtttcatttttcaaaagcttactattttgtaggactagggaaattttagagagagtgttgaacctgaatccgactcctgcttgtctaccatctgaccctaagttagcagttatgtcccatatttctatattgtaaatcagggttaatatcaagttgtagagatgaataaactgtttttgtctagtttatgaaatgttagtaagaaatggatctacgtgatgtcttgactgatatttttctatggccctgccccagaagacattttaaaatttaatgttttcatagagtaatatcctataatactctatgaaattttatagttgtaatattttacagttgtttgatacccctggcttatcaatgttcttagctctgttatttgtaatgtcatttcaggttcctatatggttgtggactcctcaaatcatgatcctggagaaaaagccagacttcagctgcctaccatgaaggagaatgacacccactgcattgatttcagttacctgttatatagccagaaggggttgaaccctggcactttgaatatcctagttagggtgaataaaggacctcttgctaatccaatttggaatgtaactggattcactggtcgtgattggcttcgggctgaactagctgtgagcaccttttggcccaatgaataccaggtaatcccctgagatttttctggtttgtgctgtcttgtattgggtatctttgtatatatagatataaatactggtcctgcaggagtaggatccctccttcttgtttcccaactccttcttgaggaggagtttgagtgccttgacacagaaccttctaactatagaaaatatttccatgcatagaaaacagtagtttggcccacaatttgttgtctactttgcaaagagttacttacttcttattctgatgtacatatttctatgtctttctgcaggaagaaatagttttgttttgatttttttccccattagactgcaatattctgactggattggcttactgatttcttgaaaataccattttggaaataaacaggagatagaattttgtgaaatatatggtctttgatggtggcattagatttttcttttccttaactaaatggaatatttaaaacaagcaaacaaacaattcaggctatccataagaacctttgggtggttttccttggaatgctcaatctgatagtgatggaaggatataatgaattatgttaattgccagttcagggttcttatgacagagtttgcttggtttaagagagaagtcccacgcaccgacttgaagacatatttcagtcatgcagactgtcaggtttaggacctgcaaatacataaccattttgtaggaactcaaagcttgtgttttacatgatatttcaacattttagaagacctacctcttcatggcttactatagaacttgtgagagtacatttatgtacaagtatattccacaacacccaatagcaaaattatttcataaaaatatttctttatggttgtaactcattaagtacaaaaaacataaataaataaataaagcatccccttacttgctttttcctgtgttgattattctagttgcatggccatagttttaccgggtgaaagctatgtctctcattttcaagttgtgtgtctgctgaaaactcggtacatttcattaggtactagtggcttccatcattcctgttcagaaaaattgctcccttttattctgacaggaaaaccatggttttgttttttgtttctttttgaatctaaacctaaaaaaaaacaggtggtttccgttgtgttctcaactttacatgatttccttgatgggtgtttaaattggtttagccattcaggtaactatttgtacctgtgcagtttttgataggtgacttagctgttgatcatctctattccaagagacacccatttgctttaagtaccagttattagagacctattgtgagatgcctcccgaaaaatgtggacgatgggcttctattcctttgtaagaaaaggaccacctcattgtgatacagaagcactacctagacttgctttcctatttatgacttaaataacttgttttctcagatcaagccttctccagctcagcttggtagctccaggaggttagtctagtgttcaggaaccaggtacatgaggcttgccctctaaattcaagggtagcctgggctatagtttgaatcttattaaagaaggaaggaaggaaggaaagaaggaaggaaggaaggaaggaagaaaggaaggaaggaaggaaggaaagaagggaagaagggaagaagaaaaaaaggaaagaaggaaagaaggaaagaaggaaggaagaagaatatccaagctttaagtaattgcttaagatttcagaacttctttttacttttgaaaaaaaaatttttagaaaaaaaagttaaaataaaaacctttttcctcgagaaaaaaagtactaacatcattgtctaaatcatcaaatgatttagctgagaccatcaaatatgtcacttaaaaaaattagacttgtaaggagttgttctcttcaggttggtgaaagtgcactattgaagtggcgcactggattgccttgtttggtatttcactctttaatattgttttaaacacagtttatatagaaatctaccagttctgcgtattcttactcttcatggctggtccatcttgggagatactagctacaaaagaatgacagtttgtgtttgcatggtagccaatttaatcagataagtgccttgagtacacactaacattgttaaatggaagaagcaggtgtatattttatattttggcaatcatcatagtaacccaggactatataagaagttggtgggttcttccattttccatctgcacccataattgatcccgtgccacagagctccatagccagatagctctgagagagagctagcctcccaggagtgtggacaagcatgtgcctgcaggtaaaaccaccactgctgctcaaagggtccctactggaacactcaggacacaagaaccaaggagtggcctagaacaagagtcttctggtttccttctgtgtctatagctaatcctgtgacacaatacaaatactgccatgagagaactggtctctcaggagtactgacacagctgggaacacaggtaagacgatcacttctcttcaaattcctgacccaagaaggacccttccagagccatcaggacacaggaaccaaggaatagccagggacaggatccttctagtttctgtctgtactccagagctgaccatgtatcacagctctccatacataaattcttccatgagaaaactggtctcccaggagtactgacacagaggcttgcaggagggacaggccacagtcagagacagcaagaccagctaattccagagataaccagatggtaagaggcaagtgcaagaacacaagtaacagaaaccaaggctacttggcatcatcagaacctagttctcccaccacagcgagccctagttaccccaacacactagaaaagcaagaatctgatttaaaatcacatctcatgctaatgatagaggactttaagaaggacacaaataacttccttaaagaatacaagggaatacaagggaatacgggtaaataggcagaagtcattaagaaggaaacaaaaatcccttaaagaattacaggaaaacaaaaccaaacaggtaaaggagctgaacaaaaccattgaggatctaaagatggaaataggaacaataaagaaatcacaaagggagccaaccttggagatagaaaacctaggaaagagatcaggagtcatagatgtaagcatcaccaacagaatacaagagatagaagagagaatcccaggtgcagaagataccatagaaaacattgacacaacagtcaaagaaaatgcaaaatacaaaaagttcctatcccaaaacatccaggaaatccaggacacaataagaaggccctaaggataagaataataagaacaagccataaggataggttcttctatacctaagaagagagtgaagattcccaagttaaagggccagtaaatatcttcatcaaaattatagaagaaaacttccctaacctaaagaaagagatgcccatacaagaagcctacagaattccaaagagatagaagcagaaatgaaattcctcttgtcacataatactcaaaatactaaatgcacaaaacaaagaaagaatattaaaagtagtaagggggaaaaggtcaaataacattaaaaggcagacctatcataattaccccagacttctcaccagagactatgaaagttagaagatactgggcagatctcatacagaccctaagagaacataaatgccagcctaggctactatacccagcaaaactctcaattaccatagatggagaaaacaagatattccatgacaaaaccaaatttaaacaatagttttaaacaaatgcagtcctacagaggataatagatgtaaaattccaaaacaaggcaaactacaccctagacaaagcaagaaagtaatcttctttcaacaaacccaaaagaatatagccacacaaacataagtccatcactaacaacaaaaataacaggaagcaacaatcactattccttaatatctcttaacatcacatcaatgggctcaagtccccaataaaaagacatagactaacaggctggatacataaaatggacccagcattttgctgcatacaggaaacatatctcagtgtcaaagacaaacactacctcagagtaaaggtctggaaaactattttccaagcgaatggttccaagaaacaagctggaataaccattctaatattgaataatagtgactttcaaccaaaagtcatcaaaaaagttaaggaaagacgttgaatatttatcaaagggtaaaacaatctaccaagaagaactctcaattctgaacatctatgatccaagtgcaagggcagccacattaataaaagaaaacatattaaagctcaaggcacacattgcaccctacacaatactagtgggattcttcaacaccccactctcatcaatgggcagatcatggaaacacaaactaaacagagacacagtgaaacttacagaaattatggaccaaatatatatattatataacatttcatccttaaataaaagaatataccatcttctgagcaccttatggtatcttctccaaaactgactatacctaataatagtaaaagcaatatacagcaaaccagtagccaatatcaaactaaatgaagagaaaattgaagcaatctcactataatcagggataagaagaggctggccactctctccctatctattcaatatagtccttgaaggtctagctggagcaactaggcaacaaaaagaggtaaagagaaacaaattgaaaagaaagaagtcaaaatatcagtatttgctgatgatatgatcatatatgtaagtgaccctaaaaattccaccagagaattcctaaagctgataaacaactttagcaaagtggttggatataaaattaactcaaacaaaccagtagccttcctctactcaaaggagaaacaggctgagaaagaaatttgggaaacaacaccttcaaaatagtcacaaacaatataatgtatcttgctgtgattctaaccagaagatgctccaacatgtaataaggacacatgcctcactatgttcacagcagtcatatttataatagccagaagctggaaacaacccagacgtccctcaccagaggaatggttacagaaaatgtggtacttttacacagttgaatattactcagctaataaaatcactaacttcatgagattcacaggaaaatagatggaacttgagaataccatcctgagtgaggtgactcagtcacaaaggaacaaccatggtatgtactcactgataagtggatatcagccccaaactttggaatacctaagtttcaattcaaagaccacatgaaacctaagacaaaggaataccaaaatgtggatgcttcagtgcttttttttaagcagggtgaacaaaatactcacaggaggaaatatggaaataaattgtggagcagagacttaaggaaaggccatccagacactgccccatctggtgatccatcccatatacagccaccaaacctggaccctattgtggatgccgggaagtgcttgcttatagaagcctgatatggctcttgcctgagaggctctgccagatcctgacaaatacagagatggatgcttgcaggtaaccactggactgagcttgagggtccctgatggaggagttggagaggggactgaaggagctgagggagtttgcagccccatggagggagccactgtgtcaatacctcagatcctcggagcttcctgggactggaccactaaccagagtacacatgaagggtcccatggctctggcagaagtgtctcatatgtggcagaagatggccctgttggatatcagtgggaggagaggcccttgggcctgagggtgctcgatgtcccagtgtaggggaatgtcagggagggagaacaggagtggttgagtgtgggagcaccatcatagaggcaggataaggggtttctgaaggggagacctggagaggggaaaacatttgaaatgtaaattaaagagaatatctaatccaaaaaaagaagaacaaggaggaggaggaggagatgatgatgatgatgatgaagaggaagaagaagaagaagaagaagaagaagaagaagaagaagaagaagaagaaggagaaggagaaggagaaggagaaggagaaggagaaggagaaggagaaggagaaggagaaggagaaggagaaggagaaggagaaggagaaggagaaggagaagcagcagcagcagcagcagctggtgtgtgtctcccttccagagaattgttcccttcctcctagtatactgatagaatgtctcacatttatatttattttatgtgtcatggtatgaagatgcagtgacataatctagacttgaattcaggactgtatattcttaagttgactgccgaataaataacaaacagaaatgcttgtttctaaaggacaaaaagtcttttagaaacagaataactggttgcattaaagctaaagctctgccaagtaaagagtaataatcttccctttagaagccagactctgcttgtgttcgggaagggagttttgctttggcattaaacccatttgctttgaacagcaaggttgttactaaatgaggcggagagataacgtacataacctgtaaaactcttagtggagacttaatctgttgctttctattaacaggacacacatcattaatctcaaaaatgatgtgtggtgaatattacagggctctggcctggaactaaattgcaacaatgtagcaannnnnnnnnnnnnnnnnnnncccccccctttaggagagacaagcacagacctggtgcaatccattttctctacttttttttctggtgctttgatgtaagaacatgggctgtagcctctggctttgcctcctttttagagttccattcacgtgtgttgtgctaatattttggcaatagagtaattcctatgctccaagagattgctatagtccagagagcggagattctgctggttctggatcaaagaagatgctgagttaagtcaagtaagcacatacatgaataggttgcctgtaaaagactgcatatggtgggagagcagcttctgtatcaggagcctgctgctagccatcctttagaggtccaggggtggtaaacatctcctccacttcttagatcttccaattttcctagtccttatttgtctatgcaggccccaccttggatatatactataaagttacatagtcccagtataaaactacattgtgtgaacattgcataaagttacatactgacattataaagttcaaattatttggattatataatccaaactatgactcattgttgtgaatactgagatgtatttagatgctgtttgtgtgtgtgtgtgtatgtgtgtgtgtgtgtgtgtgtgtgtgtgtgtgtgtgtgtgtgtgtgtgtgtgtgtttgctaaccactgtaggctcctctcacactggaaggacttctcatttcatttgcatttctcattccttttgtaggtaagggtggggaaatgacaattctctggattgtgagttaggagagggaaataggaggaggcaggtcattactagggcactcctctgaagaagaaaatgattgactagccttaacaaggcagcaagagtatatagaaagggccttaccaatatccccaggcaaagtagtacaatatataataatagcaataaatattgtttaaattgctcgtagatgagtattttgcttcctaaaatgatatgtacggggtcgtttttctcaagttgctcatatttatggtttacggcttgcacaggaagacatgtcagaagtgaacgtatgtatgtctgtgttgaaacaaagtcacatttctagtgtcctaatatatagaacataaacatataaattcgtacaaaactataggttgcatgagagtgtctcgatggattgcaggcagaaaggaaggaaggaaggggattatgcctcccatatatgcagtgctgtcctcgatcagctgtgtatcacatcctttctagtttaccatttcatgtaaagtaaatgtatcttaccttcctaggtggaacaggtttccaattagtgagtggaggattaaaattcctctttgccctctttagttacttagcctggctgataaaatttggactctgcacctctctgtacctattgaatgtaactgtgtacgtaggcttcttttagtaatggcagctgtgatggctctgcgtcgtcgtcattgtgtctcacttttatatggataaccgttcagttttcagtttttctcacttattatcaaggtggatcttccctggctgtcttttcacctctatgcttgcctttgtttcacctaaggtccaaatgaggatagaaagcctcgtgagttattacacagttattgttttttctaaaacttcagagtatgacttctctgcttcctgaggcaatttggaatggaatgtctcctcttctttgatgttagactctgtattgattggctgatgaatgtgagctcatgtaaacaaacaaagacaaatgaacaggagctctgcttttaaccacaggtaattgtttgcatacagcctgaccctctacttagctagatctgcttctgttcagaacctgaggagttgtcatgacaccctaggctacatagggagccactgattgttttgaggactcttgccatgagattaatttaattcctcttaaataactgattgaaaaataatggccattaggagagtcaggctttgttcgatatatgactctctccttgagcatgaatttgtcccatggggacatggaagagtactacattctttgcttgctcaaatttcttgcacttttagtctggttagctggatctgagacaacacacttacattttgtctttattaattatttagccttcatttgattgagacagtctttacacagcaatataaaataacatggataaatgcaaaaacatgagaattgtttccttatcatcagcttagtgatactttctgatacctcaccttcattatcaattcaattccatactgtagatgaaaagtgtgtgcatcaacttcaaattaattctcatttcagctgttgtctgtgctaatatttgatagttaacttgtatgagtctgtgatttttaatttccagtacaaagcaattgaatatctggtttgtgtgttgtcattttcaaagactaatcttttttcttttcatctgcatgtagtatatgaaggaagtactgggttttcaaagagaaaacaaagttaaatgtatttatgctttgtgcagtgaatatttcagtgtcattccatagactaaatcagaaaaataaaaatatctaattttctatattagtgtaaatattttaagtgtttccttcaagagtttaggaagaaaatataaggaaaatagacatagaagctggtatctatttttccttcagataaaaatgactataattgttgcttcctataaccccatttaaaaatggggctcagagctaaacaaagaattctcacctgaggaatacctaatggccgaaaaatgacctgaaaaaatgttcagcatccttaatcatcagggaaatgcaaatcaaaacaaccctgagattccacctcacaccacacagaatggctaagatcaaaaattcaggtgacagcagatgctggtgaggatgtggagaaagaggaacactcctccattgttggtgggattgcaagcttgtacaaccactctggaaatcagtctggcagttcctcagaaaattggacatagtaaaactggaagatccagcaatacctctcctgggcatatacccagaagatgttccaaccggtaagaaggacacatgctccactatcgtcatagcagccttatttataacagccagaagctggaaagaacccagatgcccctcaacagaggaatggatacagaaaatgtggtacatttacacaatggagtactactccgctattaaaaagaatgaatttatgaaattcctaggcaaatggatggacttggagggcatcatcctgagtgaggtaacccaatcacaaaagaactcacatgatatgtactcactgataagtggatattagcccagaaacttagaataccccagatataagatacaatttgctaaacacatgaaactcaagaagaatgaagaccaaagtgtggacactttgccccttcttagaattgagaacaaaacacccatggaaggagttacagagacacaatttggagctgagacgaaaggatggaccgtctagagactgccatatccagggatccatcccataatcagcctccaaacgctgatactattgcatacactagcaagattttgctgaaaggacccagatatagctgtctcttgtgagactatgccggggcctagcaaacacagaagtggatgctcacagtcagctattggatggatcacagggcccccaatggaggagctagagaaagtacccaaggagctaaagtgatctgcaaccctataggtggaacaacaatatgaactacccagtaccccccagagctcgtgtctctagctgcatatgtatcagaagaaggcctagtcggccatcagtggaaagagaggcccattggtcatgcaaactttatctgcctcagtacaggggaatgccagggcnnnnnnnnnnnnnnnnnnnngggggggagcgcgtgggggacttttgggatagcattggaaatataaatgaaataaatacctaattaaaaaaaaacaaaataaaaaaatgactataattacatagcatgctacaatgcctaatataaaaatgttagactatgaaaaggaatttttaagattgtaaatatctattcatataatttagtgaacaatttatagataaatagttgttttaaggcaaacccaatagtgttaaaatataatgttttagaggttgaagtaggagggtcattatttaagaaagcagcctctaatatgtaaagactatatcagaataggctaaccacacaaccagataaccagttaactcaccaatgagttaaccaaccgatcaatcagtcatacaaactaccagataacaagatcaattataatgcaactatgccacccccaaacaaatgaccagctagccagctaatttacagactaacccttcaaccaaccaactaatcaacaaaatagcagctaaacagctaaattacccctcaactggtcagctaaccagttaacttactttcttaccaaccagccaatcaaccaacccactcaactaattagcccccatttagtcacatccctaagcccagtaaactggctaggcagaaacaggcacagtgatcaaaggctccccccccaccccccccacccccaggatatcatggatatgttttagttaggtgaagttttgcaacccaagagcataagcttttagagtttttattaagagacctacccactcttcttagagtctgtcagcaaactaaatttgctttcatcttcagtctttaaaataagtgttcacaactcacagctctgctcaggggctacctcaacaatgataaccattttctaatcatcttaatatatcagctatatatcggttacttttcctggatggtaattctcagacatcacaatattttctttgaattaaattttcactctccatgctccaattgttacttgtattttttatttattttttattttatcttattttattacttttgagatgtgatctctctatgaagctctggttctcctagaactcactatgcagaccaggctggccttgaaggacaagtgtaggcaaccacattatgatcacatttcagtactggaaccagagtcaggttctggtcagttaatggctgtacgctttctctaaaaaaatattttttattgtcatttggtattatctcttctgaagtactggatggtttgcatcaattctctactcaagagatgagtagacgagacaagctgaatataactgtacaccttgatgaactgaattttgtttccttgtcatgagcatgcattgggatgctatgcccttcttaatattcgccagggtttagagagaaaaataaacaaacaaaatgtatacagagaagtcagaatgagccccctgtgagtgggcagccacacagatgtagttcaaggggatggcctctagatgataggaccagggactttatgctgattcctctggacattgttggcaagggttcccaaatccagttctggagacacgtctgtgttgattctaaattggagtttgtcatcaggacactgtgatgacaatgatggtctttaaaggtcctcttaagggctgagttcagcagatcaaagtgagtctaccttctgtcagcagacgctcttcaggcacacactgctattaaaacttgtacttaggaactgcttttctagaaagcactgactcttcacttgggcccacagagtaaataaatcaggataaagcctgccttctttgcattggctttctctcttctttacttgggtcagccttctatttaactctgcttgtaggtatgttcattactcctgggatgtttctagtcaaccttgtagaatctaagctgtttcatattctttggagtctgaaggcaccatggcttccactgtgactctctggacctgagtgttggagtgagacccttgaagtcctgatagctaacatttttgggtactggtctagttgtggggtggtgttggggccaaccatcttctgttatcttcagctaggtagtgatttattttttaggaacacaactggactcttatcagataaacttcttgtattccaaactggtttatttaagaagtctttcttttgtcaccagaagtgctaaattttgttcatttaagcttatttttactgttgggaccgccaggaaacctccccttactacaatagatgaaggctgcccagatgatgctcttagactccatctgtctgttaagtccttaatctcctacacctgggtggcttctaatcttttatttgttttatgtaccagtggctccaagagggacaattctgtgttgaatatgccaaccaagttcccttgtgccataaaagggcatgctgcttctccagccagccccagaaatggaagggggttctgttcccaaatggacctgctgggtttaatgcatcccagttagcaagtggctttcacttgctctaaagccaggagtgccctgttgattggcagcaggaagctccttgttcatgtggagagttccattttgcaggggcactagcctctgagacttgtcagcatatggcctttatgatacagtaaaaggtcttttctgcttttctcatagccatttgtggctcagtttggaaccttttgagttacttagccatggccctgaactgtaagggacagcaattttaaatgagtttgttgtttgaatctgccttggtgaaggtttttttttttttttttttttttttttttgttctttaagatagaaaactagcaagcagagagtagatagagccaagctaactgctgtttctcagtcatcactgtactaacttcatttcaatgggctgtggtgcccagaggttaggctcagaattgaatttcagccctgagtcccactcaggttccggggggagctcatgttgcagaaacaagcctcttacttcggtcacggaagccttcttaacaaatccctgcatacaatcaaatcgtggctatttatctgctacactagggttcctgacaatcagactggatgagggtaaagcccaccttctctgttcttcaaatcaaagtgtgacagattcttggtgacataacaaggcagaatttctgccaggccaagaattgctaaagcatttcagggaaaagaacagaaaaaggtgacaagccagtcattcactggttcatgcttttgattatctacctgtgtgtgattgcatcactttggtttatgggacagaggctagctttgttttattttttattttgtttgtttgttattttttacatctcataaccactattaactaggggtcaggatggtaagaattggtgggtcttaacaccattatttgtgattatattgcttagaattagtgaactgatctcattctgagcatggcaagtttagtataataatggtaattactaatggaatttgaatagaagaaattaaaaacatatattttttattttgtttttttttgtttaactgggtatttatttcatttacatttccaatgctatcccaaaagtcctccacccgctcccccacccactcccacttcttggccctggagttcccctgtactgaggcagataaagtttgcacgactgatgggcctctctttctactgatggccgactaggccatcttctgatacatatgcagctagagacacgagctctgggggatactgggtagttcatactgttgttccacctatacggttgcagatccctttagctccctttttttttttttttttttttttaatatcagggaaattgtctggaagtataaattaaagtgacatttgaaccttaaaaagtaacctaaccaaacaaacctccttttagttgctgactgtgaggaaagcttttttccttgttggggacactgaaagttttctgtgacctttcaggtaacagattttgaaggaggttctctattcttctccatagcaactgccaccatgtttcaatactgctgttatcttacctagttggatttcaaggccttgatttggttggtttctcaaggctccggtagcttccacccccttctttgcttttagtcctggtttgggaggcccatatacagtgaacacctggacccaaggggaatctggcccctccgaggaaagaacttgtccttggtcataggtctgaggacactggaatgcgatagatatgatgcctgtcttatgaactttgatgagattccatgagccattctagcaccgtgttgattggtttgtagtgcaggaaggagaaaggtctgtttctagtaacaaactcccgtagaagagatggcctagcactcagaacacttgtttctgaggacctaggtttcatttgaaggacccacatggcaggtgacagtctgtaacactccaaggaatcttctggcctctcctggcccctgcctgcactgcacacatgtggaatgaaaatccacataggtaaaacaacaacctactctgtgtgttgtggggcatacatttaatgcatgtgagtggtgcatgcacataagtccctatccattcacatggatgtgggagacagagtaggacatcaaatatcttcactcttgctttctccattccccatgaaacagtctctcatagaaccataatcttgtctttaagtacaagctctctggcctgtgattcatttacctttgtaggaatagacctggctctctttcttcttctattggaaattcaactgaggccttcaggatttcactgtaagcatttctaactgcctattggtcttcctgctctggaaaatccagcattgttttgcaattcatgccaagtcggacaatttttttttattgttgttttgttttgattttttaaaagaactttttttaaatggatggctaaaaaaatgctttatttcaaaaaggaggaagaacattaagacatcaaaagtgcacaagacaatgagaaaacatgtatcagaatgagaccatagttcagccatattgacagctgcaccaagggtggatgggcaaagggcgttaatttttaaaagaaattaaaagggaaaccttgtctcaaacttccctgttagttagtttcatttcaaacattaactgcgtatatccaaatagctacgactacccaaaggatagcttctaacaggtagtcctagaatctaaaaaacacttcctatgttttcaaacttacatttaaatcttttttttttttttgagactttcaccaagattctatcttagaaggtaagaatagagaaatttaacactcttcccaattattgaaacaactaagcactttttggtctttcttaataggggtaaagtactccccaccgccatttatagggttaaaaactttaacctgaaaggtttgcctgatcttactctctaacctctgctgtcagagacccattgaccacatggaatatgagcatcacacacctgacagtggctgaacaaaccaggatttgtcttttgttcaactgtcttttagaagacgtaggtgctttgtgtattttactatgaaacatttcttctcctctctagcttaaatggaaagagtgttttcattgttaccatgcactgaaattacctctcctatgtgacttgtaaatcctggggagataagtaagttccaaagtttctttgatacaagtctgctttctctctgtgatgtatccagggtcagtgacatgagctgtgttccccacctcagcatcctgcctctgtgtggattggccagactatgaagacacacttcatctctagtagtttctcagtgaggagtagagacgcacctagggctgtattctcatttctattgagtacaccacagacaaagtatcaacacacctctaggcagttttcatgctcagaactgtacaactaattagtgtcttccaaggctgcgccctcccacctaactatagtgaggcctttgtcttctcaagatagacttctctgtggttctccttgtctctagacttcacgtaattatttaatgagtgttgtaatggaaataagaagcccttggaagtacaatcataatggaaatctcatgctctttaaattctaggcaaaacatcttatcatctctcaaagaaaaatagcttaaggaacttgtcttagtgttgattcttagtgctgtttttttatactttctttggtgttagaaaaagttgaattcctggcttctgtccgaggcccagtggggaaagtgctttttctataagggtgaggacctgtgttttgttccccagtatccataaatctgtaatctcagggtgaggaacaccctgggcccatcctgactaatctattcaaaatggtaaactttaagttcactgacacattgtcacaacaaaaaaggtagagagttccaaaggaatatatccaatgctagcctctggcctccagatatacacacataggcaagcatacccacacatacattagtgcatgccattcacactagagggattgttaatatccacttggaaaatatatggttttaacacagtacagtgtgttgatatggtatcataccaatccttaagaactgatttctgtacaaataaaacacagggaagaacactgatgagaaatgaaagagggttaatctcctaaaagtgtttattctcagtcctgatcttcaactgtaggcataccttcatacacataattccacactaaggccatcttttctagataatagaaacctaaagttctgaaagcaaacctaagcctcaggagaatgtctaggtaagcttaggggtagattcagtgaacagaaaggggaggctggcttcagaagatcttgtgaacaatgagagccaatctcagcactggtggggctcattgatttagtatagccctattctcgttctggccagatacatggaggaggtgctagaagagatttgtgggagtggaggtgagaaaagtcagttcttgtcaaaaacagtttggagaccaaccagaagggagctgaaaattattgtcaagttagcttaagggtaaggaggcagaattttcaacaatttccaaagtggctgttaacacacttctctaaaattgtactcaggatttatgaggcatgccattctcagcgttaatgttacaaaatcaaactctgccatgcaactctgccaaccatagggacagctctgcatcctacaacatcgagtatcaagcagagatttaattctttaggtaaaaataatcaggcacatgtaactcattagtatggaaatttattctcaacttcacaatgtttaaatgttttgtctaacaaagaattacatgagcatgaatttattacttgtaataagtaaacttgactttaaacctatttcatatgtttgtatacctgggttcatataaaaatttctggggtagaagggggccctatgtggaaagtaaattagagagacctaatttatcagtagcttcgggagtaagaatggctatgttgcaataaagccttatttttgaacacccaaagtctattttatatattttaggtgttgtaaaatattattcatttcttcttgtttaactccaaccatctatacatgtagaaaacattactgtgtggaccacaggatatgtaataacaagcctcaggctggctttggctggttagaggtgatttagcaaactgttgtataatagggaataacttcagggcaagactggcttattattatttctcaaagaaagtataaataaccatccttccatgccaggacagcatgctcccaagcattagaacttttgcccaggttcttaccctacctgatggtttcctagaaaacacgctcctgcctcaccatctttctctagcatctgcacggtgacgcttccacagaccattctgtttgaattaacaacctgccccctcctcagctttcaaggtataaagtcacccttagatatgactaatcacaaatatcttttcttaaattacaattttaacttgtagatagaggctaacctgtatttgcttggggcagggctgtattttctttccagagctgttattaccattgagtattaactaaaaccacaatggatggtctgtctcctgcaagcccaactcctgcccatacataacacttgcttctttactccatggcacatcctgagttctccaaactgttgcatattcgcagttttaatatgcaactgagaatattataattaattttataactcagttataaaacaggggcttctatcagaaattattgggaaatatttgctggataaagaaataaatattataaactttaaaaatagaatgcacaaataccctcattttctcaaccaaccaaggtccacagagctccaagggactaaaccactaactaaagagtatatacatggagggacctatggctgtggccacatacgtagagaggatggccttgttggatttaatgggaggagaggtccttggtcctgtgaaggctagatgccccagtgtaggggaatgccacggtggtgaagaatgagtgggtaggtgggtgggtgggtgggggagcaccttcatagaagcaggcagatggaatatagagtttccagtgggaaaaccaggaaaggggataacatttggaaggtaaataaagataatatccccccaacccccaaaaagaaggaggctggggaaagtcaaggagaaaagggtaaggtgctttatatgggagaatattaataatagaatattagtgtgatatatttatataaacaacaaaaatgttttttttaataataaacaaaccatttcgagattaataataaaaataagaaagttaaaacaaaacaaaaaaaaccctcactggttgttattgaagagggtctggttcatttcccatcacccacatgctggttcgtggtatgttgtatcctatcctgtcctctgcagaacactggatatagaatgcacagagatacataaagggaaaccatacataaacattaacatattcataaatcaaggtactttcctcctactttgtgagaaaccttagataggcaggttacaactaatatttggtaaatgtttattcataaccctttctttagctggaaagggttctttctatacaatgcaaatgattaactagtcagttaggtctcctaataggaaggcaatgaatggctgttaaagatgcccgagaaaatgcatcattggaattggcactcttctcctctctgtactgcgctgaagtgttaatcaattaatcagccctgcaaaggctttgatggccgccatacttctttcttgggaataacttccatatggtctcttatgaaatggttcccaacttttgcactataacagattttctcagtgtgcactggattgcctggaagttttgttttttaaaatgttctggcctctaatcccagacattctgatttcaacgtatagagtaaagactaagactgtagatgcagttgtcagtgtatggaaatggaccaaccagaaggttttaggtttttcttagcttttttctaaccatgttgtttgtcaattattcagttctagaggaagaggaggaagaggaggacgaggagaatgtggtggtggtggtaaacgggttatttttgaatgaaccttaatagtatcatgattttgggtcttagaaatttattctgaggtgtcttttcacatatgcctaaggatattgtaatatagaaccagtcatgtgctttctgaccacagcttacttcaaatcttacatcatttctttgtacttgggtatcctgggacttaggagcctttgtatgtacttttaactgccctatgaaaatggtgattagacattaaaaactcactttttttgtttgttggttttgtttttttcttttgtaccatctctttttatttccaagtcaagtttctaaccttcaaatagtaagtgaacccagttgctgtcgtgttcatttataaaatgctttgcatatgaagagatgttgctaaaaaagtttcatgaccgcacacaggagtttcttacattgtgcacatctgaaatatgtactgatcatccagttatcttttaaaaggaaatcaattatcagtaatggaaggattttcacacagaagagtgaagttatatgtgtaagtatattcctctttatcggggctatgatgcattttttatactatattataattgtgtatatacacaaaaacatgttctctttttattgctactgcaaaagtatactgtagctcacaaatatatgggcttagtataataactaaagatcatattctttcaatgtattatttcttttcagcagttcagtctactaatgtttataaaataatccatttctgtacctatattatttaatgaaatataattttgtttagtctaaagtagttagaatgtatattatcaacatagtatgtgaagtgtgtctcaagttttcataataagtaaacaaatagctggtgtctgtttgcaactcagtttatatttgagttgcagaatatggagaagtcagggtagtgttcaattagaagattcatctttccgaattagtgttcttggtgctggaaggtgctacacactctgcaagcagagaaaagtaagaatcaatttcacccaacaatggaccctgaaagctacaacagatgtatgggaagatatgtacattagtgaattagtgatgtgcacgttatgggtgtaacccaccagttctgatctgctctaagtcccatttcatgagatgggatttatagttgtcactattaaaggagcaaataacctgagactagatggcatataggttgggagtggggctgcacaacaatattgttagtaagtagctaattcttaaaatatgttggtcctagcatatatatatttcacattcattgcaaatactctatgcccaatgaacaagataaaattcaataagttttttctttgccctccaatagcatgatcaattgattttatacaaataaatatgtaaattgtaggcggacattttgtattatttactaattgcagagaagcaagaggctagactgtaaaatgcagaaagatccctcagtacaccagcttactaatttaaataataagagaagaacagtcctctggtagcatttctgtttctgaattcactccattgaaaactgagtgaagcaagagatttctttcatgactataccaataaacgtggagagaaatctgttttgagataaagcgtctatgtaatgaagaatagacacttagaaataaggttgttactaccagtgtgaggttaggaataaagtgatgccaagttctccatagccataacataatagtgaccatttttcctttttcaaatatatttggtcctaaaataaaatttaatattttaaagttgtaaaatgcatttaagtagtgttcgtagtatgataagatatctataagagtttgtgaagatctgtaagacaagataattattaatatggtgggaatgtttcctgtctaaaactcaggtgttggtgaggtggtgataaaagaggagatgaagccacagattcacctccttctgtaccttagaaaagaagcatatgtagcagaggatggcctagtcgaccatcagtgggaggagaagcccttggtcctgtgaaggttctatgccccagtataggataatgccagggccaggaagcaggagtgggtgggttggggagcaagacgagggagaaggggagaggggattttcagagaggagactaggaaaggggataacattagaaatgtaaatgaagaaaacacctaattaataatatatattttaaaaaagctaacctccccctcccgttccaccacagaaaggctggattcatcattcttgagactgtagatatagatagtatcctcttataagcagaacacagcctttgactaacacccaaacattccagtcctgtgatctttaacttcctcaagaattgagagaaataaatgtattccatgtaagcaaccctaactctgttacttggtcatagcagcatgaacaaacgaaagcaaattacttattctgtacaaacaattttacatggattgtcatctttaattttcacatggttaattaaaattttattatttcacaatgaggaaactgaagttttaactagcctgttgcaaggctagtgaccattagttgtgtattgaaatcctcagtatttactaaataagtatttagtaaatgtccaagaggactgtttgatttctttaaggaaggatgttgcaaattattttgcaacattgaaattcttttccatgtagagatacaaatacaaattaatatagttgttatattgccatatttttctgttttgtgtgtatgcagacaaggcagtaaatatttacatcagaattcaaagttaaagcttgtctttattggaggtggcacaaaggaggaagaacacacacagcaaatgtgttgtatccttaatggaagttgcgttgtgagttttgaaagaagggagaatttcaggaccagataaaatagcggctataaattcacacagttgtgaatggtgtctgggaaattatggttctttgcatttgaatcttggaggtaaaatataaaataatatttgaaatggaaatgctttccaaagaagaggggcctttgtatttgttcacactaatttgttagtgttgctgaggttgcaattggagtatcagcagccctaacaggtttgttgttatccatgtcttaaaagcattctaggtctgggacatgcttctatgtttaaggacatggtgcagtcaagcctcgtgacctgttgtgttctcctccccctccccccccccccccccggcctccgaggtccacattatagaaggagtacataacatctatgaaaatttattcacatgcatacatatgcacatacccaaattcaactcaaaaattgaaaaatgagctggacaagatgacttagtggttaagaactctttgttatttttacagaggactgggtacacttttttaaacttctctgggcactaagcatgtgggcacatgttatatagaaatacatgcatgctaaacatttatacatataaaataaataaatctaaaagagaataaactataatattctaattacctatgctatctttttgtatgttcccatcttaaaatgcgtttgttcagttttcaaaataaacttggtgtgtatttcaaatacagggtacaattcccttgagaaatgcattgattacaatcataaattacacagaaacatcattagaacttgctgatacaaatttgttttttctgtaataaaagtaattttttctcaacttttttttggtgtgtgtgtgtgagtctttgagatataataatttttcttttggatagttgacccatcagctcagtaaattcaaataggcctttttctttcttcaacttctgattggtagcctgggatacttatctaaatatatctaaatggatatatacatatgtatgtaaatcttatatatttaataaataataaatatacaaataaatatatctaaataagaattttctacttctcttttctctttctatcagcaggatatacttttgtttcctctttccttcatattgagatttaaaagacactgactttcttgctcaaccctaagtggtaagggaattggtattctgtcagaaaaattcaccatgtatttgtaataaaactggttaaaaacaaatgcctttgacttcttactgttagtgtgcatatatatatatatatatatatatatatatacatatatatatatgtgtgtgtgtgtgtgtgtgtgtgtgtgtgtgtgtgtgtgtatgtgtatgtgtatgtgtgtgtgtatgtatgtgtaactagggcaattgcaagaaaaaaaagagatggccaagccagaaaaataggtaatactgttaaagcaacaagccctccttgaaaacatacatgtgcaggctggatataggtcaaggactgctatattttggccatagttggccaatggcatggtattccaggagagattctgaactgtgaccagagcaacttgaaagagataagtgttccataaggtgcatcagctaccagatggccacagatagtgatcagaaaagagaataactgttgggagaaggattttgtgcacctgagttctaactataaccaagcccttagaaatattttgactttggatgcatgctatactgtattagtttcctcttgcaatgtaagaaatccccaccagttggtagttgaatgttgcagtgcaggtatgggtcactagtccacagtcacagtgttgacaagagtgtgtcccttttagaaacattaagaacaagtatatttccacacatttcaaggaaaatttccaaatttgttagaatgtaaagaaatttactctgccattgcaccacacagccctatgctgtagccaatccaggggtttgttgaagtcctgttttaaactgaacctactaacaacctgagttccccttgtgcaacatccttttggaatcctcaggtcagtctgttgctctttcctttggaaccattattctgtctgttacactgaacttctattttgattttccttatttgtaaattaaatttctttgtaaaaattaaagcacaaagagaaagtacgttaaatacctggttgaatgtctgatatactataataattcagttagtgagatctatcatgacttcttacttcccatattgcttgtcttattattttccccatttcttgcttattgtaccacatgtaccacattttaaacatcaatatattttctccagtgattagacatttcgatataatatttgtacactatcgagagtatatgcatggattcattatgctagagatttcgagagcttaaatattagattgttcatgagtagcatatgttaaagcactctgcgggtctctgatatggctcccgttcccctaatttctacatcattaccttccaatcttgagcagaccaccagagtacctcagcttctattcccactgtctcactgaacaggataggaaaggactcgacatctcaggtttctagcatgattgcagtggctgttgatgtgattggtcagggaccacactgtgtataactgctctagaaacatctatgaagaaagtagtgtaattgtctttcttcacgtgtgtagtaaacatgtttctgtgaatttggctgagagctacccagaaactgaagatagcagagtagttttactaaaaatgcatgcattaaaacaaaacaaaacaaaacaaaacaaaacaaaaaaccaaacttctgaaagagatctgtcttgcaaagtagtgtcatttcaaagagaagtatgctttaacaacaggtagctatctatcagtgtgtctttctaaacaggaaagagtatctgataaagactagcatggggttttcttttttttcccaacttttaccagtatgttgagcaggctattcttcaatcatgaaaatcataaaatggaattgctctatctgagggtgcctctgcttcacaaatcaagtgtcttttaataatactgtcttgcggttgctaaacatagtgctattattttgcaatgtgacatttatgcatcatgaagagacttcatttttatataatgcgtgaaaaacgaaacatgggattaataatgttagacacatccttgaaattgcccttgaattatagcagtattaaacacctaacaatttatgtcatgtttagcctgagattgctttgataaagggaccttgtacaagtttctagaatttactttgtccacatgaaatatattaatatgacagaggttcacattttctgagcttgtctcttcagtgggaagctgaggttgtacagacgggacaggagctcaactctgtcacatttaagtcttcaggtgtgttatttaaaaaacttgttctcgcaggtttaattgctctcttaaaaaccatgagtttgaaaagtgtttagtgtcattgcattgattggacaataatagaatatcaaatgcattgttcccataatttgatttttcagccacttaagatatttaaattgggcttctgttttaatacctttttatttagactgggcatggatttttttttaaagattttatttatttatttttattatatgtaagtacactgtagctgtcttcagacaccccagaagagggagtcagatctcattacggatggttgtgagccaccatgtggttgctgggatttgaacttcggaccttcggaagagcagtcgggtgttcttacccactgagccatctcaccagccctgggcatggattttgatgaatttgatttgtgattcatttccttcaagagaatggattgtgtttgatgtaatgtgaatgaggactgggatgtgttcataaggtaatgtaactggagatttctgtaccctgaaatagacactgctcttagaaattcaaggtgaacagggatttccagttagctcactttataatagcttacaagtgtgtatagattttctagaggtctttaaaacgtagctctaaaagccttattattcagaagtacctcagtcaatctctactagaaactacagagttttcacttagtatgcatgtttatgatcactcaaatgcacatgactcaaaagacccatggaagagcaggttatagccatgatgttcaatgagtgtttggaaaggaaaagggaaagatcatgcgatctggaattcaccaggttgataggaagtgccatgtactgttgagaggcagaaaaaaatgataggtgtgaggatatgacagcagacggggtattggatattttcaattttaatttacaagcactaaaattatagctgacaattttaagcatgatcagtttttaaaaataggttgatatgtgttcaatattaaccaactgtaattttttttcattgttcatttattttatttttagatttaaactaaaatatattatagacattagattatgcttttaaaatgttttattaaagtatttctaagttcaagttttttaattgctcttattttcatgagaattattcatactggaaaagtgcatagaagactaaaaaataatattgcccttaccatattttttttgtaatatttgagagcaagggactttcaagattttatgaagaaagtgtattttcttccagggattattatttaatacagtgttgtttgcacttttaggtattcaattggtttggtttcatcatctgtatgtaagcgaatattggaacttgcaagtaaaagtagactagaaaacacaacagaaacttcattctgcttgcaatgaatgctgtgacagattgatcattattctctttgctccacccttctctaaattaggcagttcttaaaggatctaagcagaattcattagaacacacatagaaatgtactatctgcaaagttttctctataaaattaaacatgtattggatgggggaaatcctagattaacttttatacagttatgttcagaacatggtataaacttcaaagaatggtcaatgaactactttttaaaatattatttaatgtgttgatagtctgtgtgtgctttttgtatgtgctaagtagtctctcttcagttacattgatattaagggggaaaatgaagaggatccaaaatgaaaacagccagtgactatctagtaaagtagcagtcagcacatctttcccagtaataatagcctcaagctctgtcaggtgcttatgtggtagagtgtacagatatacagtgcagtccaggctccttggtcccaaagcaaagagaatgtttctatcctactttgtctatactgtgaatatcattattataagacttcatagactttataaaatgtacatctcttaaaacatgtttttttttgcatttgagagaactttttaaaattatgtatttttatccatttatttttaagatataacttaattacatttctctattccccttttccatccaaactcttctatccacttttttccactcttattcaaattatgccttcctatcctttttcccaagaccgagtttctttgttgtagtcatggctgccttggaaatagctctgtacactaggctggccttgaattcagagagatctgccagtctctgcctcccacgtgttttgattaaagacatgcaccagtacctccagattcccttttgtcactgttattgaatgtatagatatacatgtaaatacatataaactcttaaatatgacctgttcatccttataaaggtacttggatatatgttttcagggttgaccatttggcattggacaaccaactggtgtgttcttccctggggaaggccacccctcctattttcagccttctttagttgctttctgttctttctgtagggttcaggactggtcggcttttttagttcagtttgtcctgatcattggtgtctttattgtcaacctcggtttagggtggtcatgttggtaagattttaccaatgtaacgtctgttgttggtaggagatacaacttcacaagtccctgattctcttacagtcttttggctctctcttctttccagtttcctgagcttgagctgtgggactttttttgcagttatacatcctgcaggataagggtccatgaccctgaattttgattagttgtggtttttccatgccgatctctgttgcaaagagaagtttccttgatgaggactgaagacctcacttacttatagacgaatgtctataaatgttttagggattatgctggtttagtaaacaagtggtcacaaattctcctctgatgactcttgactttactagtgctctgtagttggctaggtttctattgggcatcttccacagtctctcttgttgcgtgtgtcatatatccgattagagaactattggttggcatgaacgttttagtgccaatcttaaatacatttttcctataatgccatgcagatttctgtaaaggtgttttgtccttcaaaactatggggaaatgtgatataacctttagaaatgtggttcacaaggtgagacatgtattctttcactcaacacctttaaaggagtgggtatttgaagcaaggtaacaagtaacccaaaaggtagaaggtagagggtttgcttttgttttccttttattatttcttttgtcctaaaacacagatggctcagtatctacagtctattcattttatatgtgtgatttgggatgtgcatgctaaatgtgaagggtggggaaggctcattgccgagtgtaggggtggggaggaggaggaagaggaggagagctcttgaaatgttaggattttctctggtgacattcacttaaatggtgttaaagaatgagagagggtcattttcattggtttgctgaagtccaaattaggtagaagttagcatttgttttgaaataaatgttatgaagatataaaaggatggatggattcagatggtaaagagctgtagtagccagaaggtatcaagcctggagaaatgatgggagggagaggggggttagaatactgaatatctacaagaaaaaaactgtatacacacacacacacacacacacacacacacacatattcacatgtagctgtgtggagtcaggtgaatctattggtagacttttattatttttagtttaagtgtttaaaactaactatcgattgtcttaagaattattgatcttagagtgtgtgtgtgtgtgtgtgttttatgttttgcatgttttcctttacctgcacatcatagctgaggaatattctttgtggactacgacatagaagattattccattcaccaactgatgtttagaatttatgtttattaaataattatgtctattaaaaggtacatgtatagctgggcagtggtggtgcacacctttaatcccagcacttgggaggcagaggcaggtggatttctgagttcgagggcagcctggtctacagagtaagttccaggacagcaagggctacacagagaaaccctgtctcaaaaaaataaaaaaaaatgtatatgtattataataccccttttaaaaataaaaaccctgttaatgttgagacactagaaagggagaactagcttgtatgtggtctcctaattgtgaagctatagtctgaagctgaagggattgtttgcttagctttcctgaacaagtttgtctccctagtcagcatcactctgtttgttcactggctcagacttcattcaggccttctcaggcatgtctttgtgtcaccttgtcaagttttaagttgattgggcacccctgggggaaatggtgtgggaaagacatgaacactcttgagtgccagcatagatatggcgtgaggtgaggggcgagagaagccaatggtaagccaagtcctggcagaaatctgcctccaggaggctcaagatggtcgcttaggggaagcatgtcctactctgacccttagtgccagggaggcttgcagttctgcttacaggaaggtagtaccagcagtttttatatttgttggatcgaatctattcataatctctctattttgtttgtctaatctttcaagagctgtctcattcactctgatcccaactaccattcttctcttaagtttctttgctatattattgcttgtcccttcttaatctcacacgttgcagcataataagcctggggcatctctacaaacaactctctctctccttctctctctctctcatctctctccttctctctctctcacctctctctctctctctctctcatctctctctccttctctctctcatctctctctcatctctctctctctctctctctctctctctctctctctctctctctccctccctccctccctctctctctcttcttttataaaagatttcatagttcttcctaagtgtatctgctaattaatctttacattacccctgtgaggtagacagctgaataggatattctgcacacaaagcactagaccatgctgcttctctgttatgatagaggattattgttatgttaaaatgtttatacaccaagtacataaatttgtagagatggatgtaagccgattccttgggcaaaatatatgaacgtggttatagcataaaactgcaattgtaaagcaagttttatcagcttctggtatttaaaggattgtcccagatctgcatactaaacctctgtatgatagcctctttccattctccagcctttgggtagtgacaggacacagtaagctggcgaagcaggactgcagcaagcagctatctgagatcctagatagcattacttttagactactggaagcttctttggtctttaggaatacatatacataaatcactagagtaatagcactagtagtttttgatgataacctgatgatagtgaatggaaattggttaggtgttgtacgctttgtatagagtttggtgtgggtcttctagaacatagctttttaaccctctattgcagccccatactgggcatatgactaaatgtgagagtctggaaacgttggggtctgtataggtggagatggggacttttcatgtgtaggaacagtggcctggaggatgggctgagtcttgctagtgaggtacatcctcacataagttgcttatgcatggatcatgacagtagtggcataaggaaaccactgatagtggacatgggaaaatgaggttatttttctcttgccttaaaatggcttggaatttgaatcttcaactctcttaaccctttgcctgttaacacatgtgagtggggaaacaaggaaattgctttctctataaaatatacttaaatatgtgtgattttaaaactgaaagatgctaagatcaaaaattcaggtgacagcagatgctggcgaggatgtggagaaagaggaacactcctccattgttggtgggagtgcaggcttgtacaaccactctggaaatcagtctggcggttcctcagaaaactggacatagtactaccggaggatccagcaatacctctcctgggcatatatccagaagatgccccaacaggtaagaaggacacatgctccactatgttcatagcagccttatttataatagccagaagctggaaagaacctagatgcccctcaacagaggaatggatacagaaaatgtggtacatctacacaatggagtactactcagctattaaaaagaatgaatttatgaaattcctagccaaatggatggacctggagggcatcatcctgagtgaggtaacacattcacaaagaaactcacacaatatgtattcactgataagtggatattagccccaaacctaggatacccaagatataagatataatttgctaaacacatgaaactcaaggagaatgaagactgaagtgtggacactatccccctccttagatttgggaacaaaacacccatggaaggagttacagagacggagtttggagctgagatgaaaggatggaccatgtagagactgccatagccagggatccaccccataatcagcatccaaacgctgacaccattgcatacactagcaagattttattgaaannnnnnnnnnnnnnnnnnnnttgcatacactagcaagattttattgaaaggacgcagatgtagctgtctcttgtgagactatgccggggcccagcaaacacagaagtggatgctcacagtcagctaatggatggatcatagggctcccaatggaggagctagagaaagtagccaaggagctaaagggatctgcaaccctataggtggaacaacattatgagctaaccagtaccccggagctcttgactctagctgcatatatatcaaaagatggcctagtcggccatcactggaaagagaggcccattggacttgcaaactttatatgccccagtacaggggaataccagggccaaaaagggggagtgggtgggcaggggagtggggggtgggtggatatgggggacttttggtatagcattggaaatgtaaatgagttaaatacctaataaaaaatggaaaaaaaaaactgaaagatgagtttacttttgttaccattggacctacagttaagtcagcgactcttgccttcactttgtttagagaagttcatatctggctccattcaaagcttgctctgaaccctgctttaccacagtctgtctgtcctttgaccctagatcagggttcagcacattgtatcttgtctgtgggggcagctcagtgtcaaactgtctttgtgtattgatgtagagaagtaattgctgctttctgccctcatgtgaccccatgtcacaggtattaggtttctttgcctcctataatcccagtgaagggtcagaaggagtaatcactgtcatgcagactcccatctggaagtttattttgcttaattaatgatatacactgaaagcattctttatgcctataatataaatgtataagaaaattatctttgtgttcaacattaaaacaatatatctcctagagatttctgagtatataacattttatatgtaaattttaaatgttttattgtcctaaggttgtttttaccttacgttgtctttttgtttataattttgaaaaaactggaaaacatgctcatataacttccaaacttgcatattctagtgaatcctatttttgcttaaaatttgcatggctcttaaaaaaaatgtatgcttgtgtgtaatgtgtgtgtgtgtgtgcccacatgtgaggggctgtaagatatctagtagccccctcattcttttcttctctccctaccttcctcttctttctccctctctttcttctttcccggtgagagctaatttcaaagcttccctgcctggtgacattttataaactgttgttaactattatgtacaaacattctgttcctgggatgatgagctatgtctgggtggaatgtgatggctgttgattataaagggggtgagcatccatgaggacgccccctcttctcactgcactcaaatgcactaaaagttgctgattaggggggaggagataaatagcagaaatgccactattattcttgtcaaaatcaaaaccatttcagtggtcaccgaaaaacagagttctgccttttctttgtgtttaactctgaaataatttttttcagccaatactgtgtgtgtgtgtgtgtgtgtgtgtgtgtgtgtgtgtgtgtgtgtgtgtgtgtgtgtgagagagagagagagagagagagagagagagagagagagagagagagagagatgttttgggttacctttatgttgtatgtccacttggcctctgactgtattgatccctctccgtgtgactgttgctctcgcaggtttaactgatgatcattctatagtcctccgaggaaagccattcattggggagagtgaatccattttctctgggtcttaattaaatgcatctaatcctgaagtgcctgttgcttttttttttcattttctcaaccatcgtgaatcaataactttctatttttcttgatctggggtctgacttatattaattttttgtcattaattagaatcaacctggaccacatttagcaagcagatcaggctttggcactgggtgattttttttcaagtatctatttttcttcctcctcttccttctcctccattttaaatttgccctcagtgggaatggcgctttccctgggaattggcctcatttccagctctgttcaatcctgtgtgctgtggtcacagtgtgagcttcctctacgctaagtcagaacttgggataattaatgactgagtcggaaagccaacacttaggactttgtgggcagaagaacacctcacaccagttcagatcctacctcccccattcctgaccactttgctcagacctcctcccttgactctgcttagtactgatgacaattccccagtcatgtgacatgtgcatttgttcaagtgtaacaggaaatcaggaggcttgtttgagaaccgaggatttataatgttcttattaaattttactttgttagatgcatcttactatgttagcctacggattcttgtccttttttttttttttttgagccattttctgtagacattctttaaaaaaaataataattttaattatttacattcaaatgtccgcttttctgttctcccctccgtaaaacctcacccccctcctctttgcctataagagggtgctccctccccccactcctgcctcactcctctagcattcccatttgctggggaaattaagcctctcccctcccattgatgccagataaggtagtcctctgctacatatgtagtgggagccatggacccactcacatatactcttcgggtggtggtttaatccctgggagctggaagggatccagttagttgatactgttgttcttcctatggggttgccacccccttcagctccttcagtcctttcccttactctttcattgaggtccccagggtcaggacaatggttgcctgtgattatctgcctatgtctttgtcaagtactggcagagtctctctgaatacagctataccaggcttatatttgcaagcacttcttggcatcagcaatagtgtttgtgttttgtgtctgcatatgggatggatccttaggtggggcagtctctggatggcctttccttcagccatgtcctttagacaattttatgttaaagattttgagatgagttggtggccccatccctcttctgggggccatatcctggaggcggtctctttaggttctatctccctgctcttgggtatttctgctaatgctatccccattgggtcctgggagcctctaacatccctagctcatgggactttctagtggtccctcatccctcactgctgcatatttctatttattctcttggctctctggatttctctcatgcctctttccatacctgatgctgccgcccctttcccctccccttctcctctctcatccatgtctctccttccctctgcctcctgtgattaaaaactggggtgcagaactaaacacaattctcaactgaggaatctctagtggctgagaagcacctaaggaaatgttcaacatccttactcattaggaaaatgcaaatcaaaacaaccctgatatttccccttacaccaatcagaatgactaagataaaaaactcagacaatagcagatgctggcaaggctgtggagaaagaagaacactcctccattcctggtgggagtgcaaactgttacactcactctggaaatcaatctggagctttgtcagaaaattggaaatggatctacctggaaacccaactatacttttgtgcatataccacagggatatgtgtgctccaccatgttcattgcagccttatgatagccagaaactagaaacaaccaagatgttatcaatggaagaatggatatagaaaaagtggtacatttacacaatggaatactactcagctgctaaaaatgacgacttcaagaatattgtagtcaaatggatagaactagaaaatatcatccagactagaaaggaagtacatggtatgtactcactgataagtggctatacccatgatgcaactcacagaccatatgaagcttaacaagaaggaaggtctaagtttgtatgcttcaatcctacttagaagggggaacaatagacacttataggcccatttgtgtttgataaccattctctagctacattctatgtcgaaggttggataatgttgataagtagactaagagaccaggccctgagcaggttgcagtcacttcatggtatgtaacaatctcttaaccaaaatatttcctggtgttaggtctgaaatgtcatcactctttcattatctgactcatgtttctgcctcttgactgtaaatgaacagcaggagtcttgacagatgccttactgaagtatgggctaattaagatgtatcctgtttcttttacctgttattctgatactttggacttttctttggaaaaaaaaatggaaactctttatttaaatgatcaatgtaatttacaagttttagttacttggtttggaaatacaggatataaggtgttttgttaaaactattttccttctgattttaaaatgctagggatctttttgcccttaatttcttatatattgctcatttatattgttttttgttttgtttttgtttttgtgttagtaaatagcccattatatctttccgtcgttcatttagacaaacaaacaaacaaacttgtaagttccagagaagagccagatacttcctcacactttcttcatattttagggtctcatgctttcgtgaactggcagactggaattaatttcatcctaagccattggctgagttccatccataaatcacggtagaatgttattctaacaacatagaaatggatgtgtgtcctttccccaacctttacttctttggtcaggagtcagttatgagctaggctgcccaaacttcacatgtgctcccagaccttttattgatcttctttcagaatctgtctctattattactatttcaagactcagtgtcagcagaatattgttttgagagagcaggtcatatatttcattaggatgacatatggttgttctctgacctctctcctctaagttaattctcagtgttttggccatactctttgatgcctgatatctatgactcctaagagaggacacaagacaatttttttttgtatgccagtttcatagtttgtcaacacaatcaaaaaatggaataagttgacaactgtttgcacagctgtgttattttctctggaattgataataagactcttaatttaaaagacccatccaacagtttagtttgatttattcttcaaggaaacttttagaagcttatctctaggttaaatgttcagtgtgcacgttattgaattattttctctacgagtttgagcacaaagcaaaaaggttagagaaatctattcaggctgtcataactatgcctggctatgtgtgacagatgctaagtagcagaacctttacgttttttttttttgtgtgtgtgtgtttttgttgttgttgttgttgttttgtttgttttttttgtttttttaatacacacagagaaggtttagaagggatcctttatgcctgtgaacaaacactctgcaaatgaggaatccccatttggacaaaaaaaattgtccatttttaaaaaaggtttaaaaatatatacatagtttgctaaaagtttagatttgtcaaaacatatagatctggattaaaacatcagcttgaatctttttcaggcagcggtcttgaagttataggtgagtgatagaagtaatggtcgggcaaggtcatttgaaattgcgccagactttctcccctcacatttccccattttcttcccaaataaaaccagatctgtagggacaagataagtctgtgtcctggtggtatcgtgtcattttatcagagtccattgggaactgcgtgctgcatttattgctacaaagcttagagtctgtgcatggatgtctaatacagagagttaaatgtttattgtaaaaatacttgatatttttgggcaggggttaacctatcctttcagccattactagtcttttctaggatggagtcataaacaatgtataaaagaatatacaacttgagaaaatgaatttgcttctttacaacttctgttttgtgatgagagacaatatttttactattttaaaacattttgttaaattcatgtagtaggtttaaatttatatttatattacttatagataacagaaaactctattttgtacaaaaagagtactgttattggttgacagtgtgtgtgtgtatttgtaactaaaacctattgtcacatattaatatgctttaggtattaatcactaaataatcaaattttatatatatatatgtatatgtatatgtatatgtatatgtatatgtatatatatacatatatatatacacacattatctcactgaaataagtgctacacatggtttataattatattgccaccattttaaaggcttgagcaactattttctttcagtccccacaaaataaagacagtatatcacatgcccacagaataagatacaagattttgaaatcttaactcattattattagtatttcattaagtatatttttttaatgaaatttgaatactgaacagacctgaggaagaattttgcccagttttctcatcatatgagctcaaaggattggagtcctgcaggaatattccacagggtgatgttgtatacttcattattcttgtattaggggtcagagccccatccttggcaggagtccatgtgcctttgtatttcaccatgtcccttatggcaatatgtactataattttagaactctcaagtgactattagaccttctgacattggggccatctttatctcctgattaacttgatatagagttgaacattctgtatgtcattggctgtgacttagttagtgaagctttggaacttcctctccagaaaggagcctgactgtcttcctgatgagtcagaatgatgagtctgctgtaatgggtaaaatggagcagtttcatgccaggtattactagtaaaacacagagtttcatgtacatggttagcatgtatattagcatgcctcagtgatctatggtgacaggaacatactaggcccatagtgtactaaattagagtgttcaaggtggttgtatatcagcaatgtgaggctgtgtttatttttattgtctttggggcttaaaacaaaaaccaaaacctttcttttttttcttgataacctaaactgacacagaaaaatatattcgtttccatcaagccaaaacatttcagcccatctctctacacattaaatacattgacatgtctctgttaacttataggagggtacttttgaacgacctgtttagacagattaaagatatttttatgactctttatgtggcaatcattggaacaaactgacatttttatttctgtgggaataccagttgattgtttctgtaggccatctgcctgggggactgtggcattcttttacctttattcaggagaattgtaaataccaggaaatactttaaatggacaattttaaaatgctcacacaaatgttttccatctgagtatcatgagtcacggcattaattatgccaggaggacctcaaggaaactgtctgcgctgcctagaaggctctatggaagcctgggttaaataccatgatcatgacacttaataaagcaacacaaaaagcaagcacacagtgtgtttcatattgagttttctaaataatcttttatttttagacccagagtaaatttagtaaaactctagataatgggtttcatttttttggcatttttgaaattgaaaatatattaatgagatggaaactagaaatgtagcttatcaaggacaacctttcaacagatgacatcaagccttctgtggtgtcagaatgcgattcccctaaaaactaataatagaagcaaaatagttcttttgtgttgtaatttgtaagaatcatgtttatatggggggaagggagcatcaaaatttcaacttgctataccagcagccagttttgtaagtgtaaaatttgtataatctaaccttagtctctggatgttgttaatctattatttctgcaattttccctcatactcttaccaatttccaccgaatatattttatctgagtagtgacataaaagtaacatgctgctacttttgaatcaagactagtgttccccccctgtccccgaacatctgagaaggctgtgtgtgtacttaaaggagacagtgctggacatcccccatctaaaataggactgttagctatggcacttagacaacatgcatttttgtaagattcagttgtcaagtggctgcagggaacggtctataccattagtttgaaagggtttttaacagctgaggttcatcatttggggtatgtgtatcactaggtttctttctttcttttttttttcttaaagatttatttacttattatatgtgtgtacactatagctgtattcagacactccagaagagggcatcagatttttgttacagaaggttgtgagccaccatgtggttgctgggatttgaactcaggacctttggaagagtagtcagtgctcttaaccgctgagccatctcaccagcacggatcactaggtttctgtgcttcaaaggcttgcaaactcaattttacacactcatttaagatggaagaaatttgttttttgtagaatgagttctgagacttctcaaagattaagtactactgctgtccaaagagttgaaactttcttgtattctatgtagaaaaggaatccattgtctgtggctttaatttatgttttaatgattagttcatatatgaccaaatacactacaataaaagtttaaaacttcgttgcctttgatatatttatgttgttttaagaaagaaaattattgctgtatttaactttactgttaatatagcatctttattttgttggtaaactccatacactttctgttttctattgtatgtgcgtttacatgcacatatttctctgcataagcacatgtgtacaagtgcccaaggagaccaggagatagtattggatctgtagagttgcaattgtgagctgtctgatgtgtgtgaaccaagctaaggtcctctggaagagcatcatgtgataagtaggctccttaaactgtctgtgcagttcaaggacctttggttttaatattcattttaggcatattcgatccaacttttcccagataatggaaataaatcagtaaaatatgctacaactacaaagtttcagccagtggaatttcatctgtagtcttagaactgacaaagatccacaatcacagtagaggttgagccacgagtctttcaaagttgagaccatatcttgccagcacttcctgaattgctgtaaactttgatggaggaagggctactgagtttagtctagtattgcccacagggatttgtacccgattagacctttctctttttgagtagttaataactgcttctgccagaaaaccagatcaaagcttagcgggggagatcagtacattggttttatcagccattttccagccacggctcttctaacactgataacagggtggtggtgagggaaatcaaatgcttgcaaccttcctgtggtgccgtcctcttgatttgtttaagaacctgggaggaacatgttcacagcagggacacctggacagtcctcgctccatcctgtcagagtgtaaagctctttctgtgaatccctgctctgactctggcaactgggtgccatgttttctttgctctgtacttggcaagtcaccatggctccttcaggacctggtcatctgccagccatctccctggccttggattgactgcggaagagttttgtgaggcttgtgtttcttcccctattatcaaggcaaagctctgctgcttctgttccctccctccatagactccaggactcctgaagccttttgtctctcctttttactcattcaaggctgctgttaacagggagaaaaagtttgtgacaattgaagtcacaattatagcacttgcctataacaagaccttggcatcttagtgctgtctctccttttatccatcacattagcagctttaaaacaaaaactaaaacaacaacaacaacaacaacaacaaaacagagcagaagtcacaatcttagtctcttgatgcttgacacatgtgaagatttccttatgacaagaatctattctggctaaatttctacagaaagacccaaaagatcatatgtttcagagccttttgggagtagggaatgtataaaaatctttgagcagcattctgaagaaatgtgttttatgtaaagtatcaccagaaatatattcttagggccaccgattctgcatctgcaatctcactagaagtccttgtctaaatggtgttcctatatgttgtacatgaggttaggaatacatggataatgccaggaatggatataggagaactgaacctttagcaagcatttgtttaccttgtagtaatggacaatgtgaattaacaattgctatatgtgggctgacgaaggacaaactataatcacatgtgaaactgcttggcctttataccgcttgatccaagtccatttctgttgtaaacagaagtgtggatgcttttgaggtcggatcaagctagaaacctcacgttttaatttgaaaaaaaaaaatcgtgacctttcatttagagattttataagattttcatagtataaaaatcctaggtgatatgtgacatatttgtatggcttaaaatgttaaatgtgtacatgattatatattgacattttgtcttgtattaataatcccttgttaacgttgctgtcacatattgatacctgagtcttttatctgaattctagcatcagtccagtgggaagacctaattccttttatagctatttgtttcataatgtggttccaagaaactatcatgggccccaagcaaggaccagctgtttaggggctcaggataatcgactagacgatataatcatcagaaggaaaagttaatttaatttgtttgaagactttcttgcagccacagagaatgccggattgatttttgttttactacatggaaaatgtgcaacatgttataggagaagaggcacatttgtagaataaattatcttctgtgtattacatcactaaattcaggagacttaaaaaatacctaagaaatttaagaggcattcgttgcatgtcaggtttacactgtggcttgcacggtcagcacaagaaaggcacataaacagattttatgtagttgtgctgggctattttatttataaactgtccccttgcctgtgatacaattttatctggtcctttctgactagaaactttgtagcgaggtgactcagctgtaaccctgtgcagcctcccctcattcacaaagaaaatcaattaatgaagggtggtgtctttgtaacttatgccatgtctctccattccactgtcacatagattcctccatagattttttaggcaacaggactccctagctctaatcctaattagagcaaattataaactttttctttttaactccaactttggcattaatcaagtccatttgcagatatttagccctgtgagatcatggctcccttttccttcatgtgagttagagttagctctgaggccatgcacattactcttatgctctgtcctctgtggtcttgcacgtttatatagatgtctctatggaagatcctcctacagatcctcctggaaccaactttctgtttcttagtttctagcttcttgcctcaattatctctattttagccttatattacactgccccatagaaatgcctggcacattatagatgtatgtatttggtgagtttttttcttcagtgaagacaggacccatatggtttataatttaatcctccttttcatgccgacttctacagtaccagtcacaaaatttggttctccagttaagagtgactcctcagctccttcttgctattccttacctattcttgatttatgcttggtattgttttttgtttcacagatatttatctgtacaaaacattctttgttttattacttaaatgttacagacttttttaaaaaaaagtatgtgcagttgtgagtgtttattactggttatcctgaagtacttgctaatgataattggtacaaagtttaggtttgcttagctcttaccctgccaatgagattaatgagcttaatgggtaaagcatctatactcttcaggacacttaggaaccaattctccctcctttcttataaggttagtaaactttggaatttcagaacaacgttttaagaggacatttttctgaatctcttttattttactgaaggcaataaaattcctgttctgtgggtctttgctaatagtaattagatttcaccaagtgagataggagattcttgtaaagttgtgtactcgtcccatttgattttatttgataagggcattactgattgtgtacttgacatcacagtgataggttattatgtgttttttcacccagtttgttcctttcaatcagagtgatgctacaggaaatgatgggagaaaatcatatactgggtgaatggccaaatgtcattctcattaagagttcttattcacattgtattcatgaagccaatgataaaactaataaatgttccctcagaagaattaatcctacagtttccagttcctacaaaagtaggagcataaacttagacagaatttctccaagggatatgggaagtgttacttggcagacctgttgattcagactttatctcatgaaaactagtaaagaataatatggtgagtgtgagtactaaaactgttttagttttgataactgtatttaaggagcactaggtggttcggatacgggactgaatcagactttagaaatgggatattgtgcagcagtttaacgggaagccattatgttatagagattgtgaaataaatgaattgttaaaaataattttactgttcaatggggcatagtgattattgcaggataatgactttctattggcaatgtaagcagttaatgtaattgtgatggtctctgttgcctcctgcctatagaccctgtcctcaaagaggttgccatcataagcatttgttaaagttttaacttcttttacataaacctcacttaatggccccttcactttcttttcatttatatatttcttctcatgtagaaaagatgctttttcctgctcaataatgtatggcccttggaatttagtggcaaatgtgctttaatttaaatcatcatcatcatcaatttaacaggcacctctggtaatatgtttttcacttttaaaaagtgtgtcatgaagcaaaatgtgtttctgtggggaacaggaatgattataagataatcacggacccggagggtatagagatgggaaaggtgcaagccaatgtatctcttcctttgacataatgattatttcataataactgagtgcctcattccagtcttctctgccagcaccatccaatttctccattccattctaccagactgagacaggaataatagaatttttgtgctaaaatataatgcaggtgattctatgatggttcagtatatattttagctgaaccgtgcatttccttataagaagtaagaatggcccattaacagatggagttgaaataatagagaaaataagttcttccaccctttgctgggctatccctgagttgatttgccaggattcttgtttaagagaactgcagtttgtgacatgacagtggtgtgtgtgtgtgtgtgtgtgtgtgtgtgtgtgagagagagagagagagagagagagagagtcttggggacaatttctccctatgagatcctggcttgtgttgaactcatgatcttatcgccttggactcctgagtgctcaatgcccaacttttcaagagtagttttcactgttccttttagaaggtgtagtttactttattaacctttccaagcaagatgctttctacattattaatacaaagaaaagcaactgttaggtacagagttatgtggttttcaaagagcgtaagtttgaggaccaagtctagatataatgaaatctcagctgcgtcttgctctgtgtatacttacttatttcgtccagtctcacatttgtttagaaatgctagaggctccgtcttgcagatacatgcatactgaactttcatgaatctttcttcccttggacgtcctattctgactttggttggagtatttggggtgggtaaaggaggggtagattaaggtagctgctaatggctttatggaagagacccaggccttgctgttctgttctgggataatgtgattgactccagctttctgacctatgtcagggaggactgtttcttgtcagccagctggaggcctctggtgagtgcagtgcatatgagcccctcactgaagccatgaccctgtcagtaggaaattacagatttattgagtctcttcaaacagatcgcatgattgcatgtccttctctaaggaacacagtttagggttcaaaaggcttgtgaggtaaagtcactagagtcacacaaggggccagcctttgtgtgtggaggttgaagtgtcacagctggaaatccagtttacactaacagtcaaccttaaaggtgcctcttttagctaggtatgtaaaatggtttcaggttatcatgtttattaattgtatacccagctgattttgaatctcacactttccgtatccagctgcctcccttagcttctcttttcaccttgctgatgggcatgcaaaactaaaagaatgaaggttttcttctcaccctgtacacacccagaaacacattgattttaaattatacaccaccaaaacctagtttgggtgaagtaataaataaattaggaacagtggaaggaacataaagcaatccatattttattgatactcctggtgatttcccttcttggcctatgggttgaaaagtgaattccagtttttgactgatgaaaaagtagtagtgtgtgcttttccagcagatacccagcaggttttgtggcccttctagtagtccaccgttgatgctgacttcctactctccagctgtatattattgtgtatacattttgtttctgcttatttgtggaatttaaatatgaaagttcacatgtagttgactatgatgttatacatcgagaacataatattaaatataaaatgtttcattatgctgttttgcatatcatgtttttattaattctttgagaatttcatatatatatatatatatattcatattcactttttatttcctccctagcttctcccagattcatctctacacctctcaaccttgttccttattttctttttagaaataagctactgagtccaatatctgctctctgtttagttttggtacaggacttccactgggatgtgttcggtctagcaagaaccatattgagaaagttgtctgactatctttcaaaccatcaactgtcaacagctacagccaggggtagaggcatatgaccctcttgctcttctatgctggaagactgtctgacttgatcttgcctaggtagccatagctgctctgattttactcaggaacacagtgatcctgtcatattacaagacacgatatcccttctatcctcctcatgctctggctgttaaactccttccacttccttttctgaaacagacccgagccttgcagggtgggatacagacatcccatttgctgagccctccagagatacttactctcatcaagaaaaagttcttggataagccctgagaggtgttctcatctataagtatagagatacagatttagtttgtagtttgaattatgttcaattagcaaaataatagtagtaactttacccatcaggtccttcgaattctctaatgatgaagtagattaaccataccaggtgtacattttctcctctgaaataaaccttaattgtaagcagaaagtgtttggttgcccgtataacattgctgctactattgcattcatgggtatgccttaccacacaggtcattgttttagctcacaggtttcatagttggtcaacattattgatttctgttttcccctaagcagtcaacatagcaccttttgttaccatgaaaattagccagcagcgatatgcaactattactttttaaaaagtgagatgtaattttcacttgtatttttcagaaaattttcctcaaattttttctcctgtgttttcttttgcattttatggcttacttgctcccctatggaagctctatcagttggacttgcttagaaatgttttgaggagatacataaaactttctgagttgatagtcaagctagcacttacttgtttctgatagtataagcctattgtgaatttttcccattccctcttttgtgtcgactcccttgtactaatagatgtgttgctttctgtgtggaagatgcaggattataattttagaagaccttttagctattatggacagcatttgagtttatgagaggagcaccgcatagattgagaccctttgttcagcagatgcacaggtgtcagcagcacaactaagatacaacatctgtgcctgcataggtagcttatctgagagtatgcagtcttaaccctgaatgatgggtggcaatgggatgcttggttaatgccttctgtgtaatgagctgtgtacactcattacctataatagtctctacagtttggataatgatgtattattatttctcagtttcaagactttgtcttctgcaccttcagccatatttgatatttgatttgtttctacaattttgccatcctttgtgctaagaaaaggcgtctgccctattagtgcctcaggctactatggcaaaataccatgagtagggtaactgataaacaacagcgatttgtttctcacagttctgggaggtgaaaagtgccagaccagtgtccacaagccagtgccttctagatctgttttctgactcatgggagaactgcctccccatgtcttcatataggcaggcgtgaggcgtatctggagcctcatctgcaaaggcaggaatcttagtcctgcctcctaactacctccccaaatcccaaagacctcaccttctgacacatcacttcaacttttaaattctgaacagacaaatactcagcccacagcccatatggccccttttacatgattttatggctttcagatgccctctgaaggatccagtgagtattggattacttccgagattatcaggtccctttttgtttgcctttgagctcaagggagcagaactgaagagtgctaccaaggatgaatctgtgtgtagctgatgctgttcaatcagtatggtatcaagctattaatgtgtttaaatcctagaactacctcttttttgccgtgtttccttggaaatctaagcatctatatcttcagtgcttctctacactgagtgacaccgatgtccatctgaattaatgttttaaagcagttatgatgagttgtgtgtgtatatgtgtgtgtgtgtgtgagagagagagagagaaagagagagagagagagagagaaagagagagagagtaacaattattaatgtgttagtaaatgagtgacaataatgtatgatgcttactttaatagttaactttcctggacactgaaagttgagtctgtgttagcagagtttgctgctctgctcaacaggtatatgcatattagccacagctttaatagtagtcaaattgttcctaactatggaggttgtcctaatacgtttgatgctgaccacttggctgcaagagactttcagcatgctcacgtgttggcttttaggtgaacgtgtcaatttttctcagcattggttgttcatttttagcatctgtaaggtgttagtattagtgagtgttttacctaccccggtgtctttccttgagaatcaaatgaactaatgtacattaaagtactttgtaaactctcaatgcttctctaaagtggctgcagtgtcactgttaatgacagagacatgttcatttaagcacattattatggtactttgcattgcatttggtttaaatctatgctggaataatgcccacatgaaaataataggaatacacatgctcacacatgcgcgagcacacacacacacacacacacacacacacacacacacacacacacacacacactttgttagcactggcatctcttctaagtcatatatcctttgtgcatatttgggtgtcttctggaggtagcaggctgtagccaggactggcctgccatgaaatggcccatttgttgtctaaaattgctttagaatataaaatactaacactttcctccttttggatttatgaccccagtttcaaaatcatgaaaagatgcaagagctcacctttgattttaaaatggaagagtatttcatgctgtaagattcatttcctaaagtagatacttcattcaaatgttgaaatgtattcaaatattcaatattcaatattcaaatattgaaatgtaagtcacaaaggagaagggagacattaccatagcttctatgcttacactgattttccaaaatattggagagcttgtctgctgctggggaagggttggttttttgttttgttttgttttttccttctatttctccagtaagtacctccatagcctgttagtggctctaattttttcaagttacagaacttaattctttcctcatgattgttattctgttatttggatcatcaaatatatttcaaaagagctcacagaaggtgaaaaatgtaggattacaaaatgcaaatattgattattatttcctattttaaattaggaatcttaaacatattttccaaagagagagatgctctgttttgaagcatcatggtttttattttcacatgaaaagtgtggttgtattctgtaatttaatcgagtttcgcacactgaatctagggagaaaacatgttggaactggatataacattggggtatcaacaattctgggttggagtataactttggtgctgtgtaatttgtcatccataaaaattgtgatggcatccaaacctggaaagtaatatttgacagttatagcaagccatatagccttatccacacaaagcatgcttggtcgcttctgtcatttgcacatgtggacaagcttgtttcgggctgagtaactcttcgtattgtatcctggacttagtcaagtgactcttgctgttaatgccatgaagtaattagtccatgaaagggtctagcttgaaactgtccttaaaattagacttgactcttctggaacttgtgttatgtgaaaaaatttcaataacaaaccagttgctccttttccctgttgattgcactatctttgatgcacttacaaatgctattccatgagcctgcggacatttgtatttcagaggttcttgtgcttcgggatagccaattactatagttatttatttgttgattcaagctaaattaaattttagaagctagacatagtgctgggtcaagagggagaaaacaagagaccgttgctagccatgatcaggataaaataccacgtagtgatgccagcttgtaactagagagaaagatggagaagctagcagaaagtaaatcagcttggtcattttggtcaaaataaaattttcagatttttagatgattttgtaattaaataaacacttttgcaagtggctttaatgatacccagtccccccaccaatgtctctcagtgtttcagatacatgccttggtatcagttgtctttcagctttataaacattgtcatgcaacctacctttctattggctatcgtcccttcttctccattctcccttgcaaacccactgtatgctactggttagactagatattttccagataagagattttctccacttctgcttctatctcttgggttattcccccctcttcctccccccctttccccnnnnnnnnnnnnnnnnnnnncctcttccccttcttccttttcctcctcctcttactcctccttctcctgctccccctcttctttgaatgactgcagtagtcttaataaggctctgtttctgcctttactcgcctgtaaaacactactttgcctattcctcggaataagcttctttaactcataattcaaattatatccctcttctgacatatacctgtactgcaacattggcaacattatctaagctattaaaaaaaaaaaaacttaactctgtgtgtgtgtgtgtcctgtataagtgcagttgtgagtgtggagagcaaacctggtcatcctccctttccacctcatttaaacaaggttccttgtggtttacctctttgtatgccaggctaactagcctggttgttttcagggattctactgtttacccttccatctcaccataggggcatgacaattacagatatatgttattctgtcagctgtatatgggttctgggactgtctctgtacgtccttatgctgtatcagtacctttcacattgacttaccaccaccaatctgcaaagaaactttggaggaagccatgtcatcaaatgtaatatgcagaggatatgcatatactctgtaggccaagaaagattttctaaactatatcaatgatatattgattcatggttataaacatttaaatacagtaacctataaaatttttctgtctaggtgactattgtaaggttctgtgaccttaagaccttcttcaatgaaataaaagccatcttattcattgctttttcctacatgcagcatggagaatgaaaggcattgtatgaatgagtctctttcctttttaacttcataagctataacttctagtgctaaaaagtaatgtcactaggaagtttataatcttttcctgaggattatgactttcacataaatgaatgaaaattgaaaatgcactgaatcattcttggaaaatatatttccaacttctctctctctttctctttttttcttctattctcaaggatttatttgaaagggtctattttatttttatggaaagaaagagaattcaaacttttaggaacacagcccatgaccttctttattcaactactgcaagtttgtttcacataatgaaaccattgcagaaatacagccaacctgatagtaaactacagatttgcccgcctttctccctagggatgggcttggtcaggtgtgtccctctggcctatatctatgtgaactcagtagtatgtgaacagtaacacgtaatgtttcagtttctccaatgacttttcagagagctttcctctccatacaggttgtccacaagctgtccagatctaccagactcttacaccttagcgcttccactgtggtgtgtgtttccatggtggtcagtattcttggcagtgtcattgcaattgtaaaagaagtctcatgctgggaactcagcctattaattggagcctagaactctgagctgccatgtctatttctcaatctgccatacagcagttatctttttacttgctccatcatgtgagttacctgttagaatccatatgtccgtctctgagttcctgtgttgcctttttagagatctgtaccattactctgtttcctcatagcttctacggctccttctccatgcagggcattttctgtgatacattctctgtagttggatgtttttcataagcctcttattttcccctcatgttgttagcctcttatacactattagatactgggtatgaatagttgtcttctatgcaggtataaatgctatgccaaaatgacaggagataaactcagattttaattccatgtttatcctttttaccttttacaggtgccttggatttttgttatcagttatatctgctataagcatgggcattgttaaaagaagcaaagtacagctattagctaattagactgcatgattaaccttgagatttcattgagatattttgaccttttcagtgtagtcaaatggagggtgtaattattaccgtgtttccacttagtcctgtttatcaatctttattaaaatatttcaaacactttcatgaagctaatttccatctttcagaataaaataaaaagtatggtgctttaaatatgctactaaaaaataaaactggacactttagtattaaggaggggatttttattttttcactactcctggctccatgtgagtcctcagattatattgtttaaatcattcttaatcctaattgatttctagggaaaacatattctactcattatccgttgccacaaggtcattgatgagctcctaagcagctaagtgtaaatctgcttccaggtcagtctcgcagttctgagagctgagactctgaacgaggctagtccagtcagctgggttgtttttgatgatctgcactatggtgactattaaagatgaacttaactgccctatcggtaaaaactaaattaagctttttaagtgaagggcacagaaagctgtcatttgattccccagactttaccctctttctcttacagggaaagtttatatttaaaccacaaattaaatctaaataaattctctgtagaatatttaggtattcatcttaagaatttaccttattttccaatttgggatttgaaaggcatttaaaactgctggacttagtggagcacacctttaatcccagcactctagagatacaggcaggtggagttctctgggtctgtggccagcttgctctctgtagagagttactagacagcccgagctatatagagagactccacttcactcaagaaaaaaaaaaaaatcaaataacaggtaggtcaactgagaaacctagtctggtagatagaaatatctgtatggtccacagtaaataaataaagtaaagcagccatataatctagaactcctttgcttgtggtccacaatggaagggcagtatttgtttccttgcaggctgcctgaagcctgtgcatgagtaagtatgcttgttgttaatgcacttttgattttgccaataagctttcaatcctgcaatcttcctgttgctactacactgactgtttttggttgcagatcaatcacatcctctcttttgtaaacctatcaaaggcattgctgttctgtaaggagaaagggcagacccaccagtgtcgctgcaagacaaggcccatcttctgaccactgttctctgtttagtttatcgtttgcactaactgttaggacatcctgttgtcagtctttcagaaatgggcctgatttggtagatgatgcccctcacgccctttctttgcttcaagttttaacattctgacctggaatcatttgcaatcagtgctttccaagtagaaaatcattagtgactccctcccaggtcccatgccattgctcacatgttcatagatgggtgccttctggtgattgttctctatgtgcctcctgcctgaaatatgtaccttctggtcactgtgacttactgtacttagaaatatttttcagaaaggactgctgcaaaggactgtcacttcctcagaagctttttgtttctcactaggtggacacattttctgactcctttgaactctgttatcctctgaccttgtttaacaccaacctctatgtgtaagattgctgaatatgtttttgtcttctgccacactgtgactctcttggggacaggaatcaaatggtagttattaaaattttagaattcataaatgttcaggtaaattaatatataggccatccatgcctgtatttttgttgtagctgggtatctaatgaagagactgcaacttctcattcggcttctcctctgctgattggagcacagtctagatgggtggtgcatcatcgcctatgtgggcatcacagcatttccgaaccattcccagtgtcctattgcctgtaggtcagaggactacatcttgagagaatttgctctgctttctcgcatgattctccaccttcagcatctatactatgtattgttacttgcccatgtacagtatcaatgcaaaggtgcagtaggttaaatatttcctgaagacactgggaattgcctctgatctccacaagtagtctatttctttgaggtaccagaaaggaagtaggtatgtttctgctctttgtatatgtcattaaactatgcaggtagtcaatgtggtatttctcactttcccttacttccgtttaaatcctaccagtaaaattaaggatttctatcctttggtctttcacccaccagatttaatctacaacctttgtttcatgtagctttcacaactaatctatgaaccagtctcagtctcatatttttggtagattcttttaagtctttgtagttgtatgagcagaggcaaggcatgttttaccttcactattataatttcttaaaccttctgccactcatatgtctactttattcgttgccataggctagttgtatttatcacaaaggatgctggctttgtgggccattctgttcttgtttggattgatcccttcatgaatctaaatattataaatagcaacatttcctttgattttaaaacatttatttctaagattaaaagtcaggatttgttccacacaaaaactatcagcatacctctaagaaattaatttaatcataatcataactgttgtaccttcatggtttttccaagattctaattgttttttgagagagaatcttgctatatagtcctggctgtcttggaacttgcaatgtagaccaggttgacctcaaactgaatgaaacctgcctgcttttgcctactagtgcttagattaagggcatgtatgagcaagctaggcttccaaattcttaaattcttaattctgtatgttgctgatttatgagatatgagcctatcagatatttatttcaatattttgcaaagaaggaaacgagccatgcatttttagtttattcatcttaaaaggcttccttaattaaaagtcaatacaaagtccacaagtgtgcttttgggtttacccttcatgtttttaaacgctaaaatcctggaaagcttcccgttacatttcctttgtcaaaatggtgtagaatgaattgtttactgcttcttatggttttgaactttgaatagtcctttggatagctttaaactccaacatcattaattatataattgtgtttaaattatttaataattatagtcaagaatgctactttccttgatgattgtatactcagaataaagtagaaagataatttttctatccttaatttcaactaacaataggtactctagctattctgtgaagttttgtaaaaacctatccttaccaaaatcataatttaattctagtgaagtaaaactgacagtaccatggatattatttaattcttaaagccgtatctttttttttttttacactatcgtattctttacaggtgttccctctccccccacccccagacagagtttcagtatacagacctcagtcttgggtcattctcctgcttctttcttgcccagtgttagtgtgcaccaccacaacaaactcctcctaactggttgtgataaaacgattgactattggtatgcttgactctgctgtgatgggatgagtttagcttgtgtgttaccttcagttacagcccatcacctagtttacttaaagcttacctttcctccttgtgcatgtaattctatggattccacatgaaaataggtatttacctatgacagcacatgttgaacttctttttttttttttcttaactgaatcatatggttctacattgaggcccatgagacatgagaatcacttaaaattagcagacagcaggcttgctgtgtagcaaaataagctttttttttttcagatatagttgtgtgagaatagtgatatacttctgctatgtgtaagattggactgttggtgttaaaacttaaaaggttctacttgtagattgtaggaagacaaatggtgcatcttggcaagtgagggaaaatagtactgtaattcagtgttacggtgaaagaaatagaaaccttaaccagtcatcttttatttttagctcagacaagtacctataaaatatagcccagatggggaagctatgatagtaaagatacggaaatgacattttgctgatgaattttctcctgccctttacttcccatttttatttttatacaaaatcttttatgctgaaagttgcttgcttatgtgtccaaggacagatccacagaatgaacactgtctttttcctttttttcttttttcttttctttcttttttttttcctttttgtggtgtgttctgatcatgaattatttcagtatacatttatttatttatttatctatttatttattttggtagaaattcattccattctcctctgctaattgtcattctggttctttctgtattgcaaaactccaatctaaataaattaggatattctttgaatagtgtatcatatttcatgcttacttctgaatgtatcttgttttgtggttactagtttctttttgttgttgctgattgttttgatttagtgagacagccttaatatatcacctttggtggtcttaaactcactgtgtagacaagaatggtgtaggactcactatgtagacaaggattgcctggaactcactatatggaccagacaacactggactaaaatttactatgtagacaagggtggcctggaggttgctatgtaaacaatacttgcctatagctcactgtagacaatgatggcctgaaattcactatatagacaaggcaacacttactctatagacaaaactggcctgacgctcactatgcaaaaaaacattggcatatatttcattatgtagacaatactggcctgaaagtcacttggtagacagggatgacctgaaattcaatgtgtagacaatgtttgcctggaactcatatcctgcctgtgcgtcccaagtgatgaaattaagccctggctagctctttaggtttgttttctgagtgcatcttttgcaggctccacctgcccatttgcctactgaagctgtaactgcctctacatatatcaaaacgttgatacagtttgttcagtggtctctaatctcaggcagtgtcaccatgattatgccttgaattgaagtgagaaaggaacccaggaaggatacataatgattgagatgtgagaaatgcacagtgtggttgtgtgatctgtaatgcactgagaggtgcctctccagtcttagagcctcctgcactacctcttctgcttctcatcatccttgtattctggttcttcttatgatacatcagtctcctgaggaggtcatggaatggatccctgatgccttgtaaactgtatatgatttctttgacagcctaaaattcactatatagataatactatcctcccagtggccacatgaagtaggcactaggatttgaatggaagtcagttactcagcacggaggctctggcatttcaagctgctgcacatttgtcttgcatggatctttgtgtatgtatatgtgttgtgtttgtttgtgggtgtgtgtgtgtgtgcgtgcacacgcacatgcactcatatgtctgtgtgtgtttgcttataagcatgatagatatataaaataatctttgatatattcagggccccaatacaaaaacccttgacagaatgtagatgatactgtttcctcaaaggtatatttgtgataggaagaccgactgtgcagagaacccaaagacttgtatttatttcatgaatatcattaattttcaatggaagttttaagagctcttttcagaggtgaaaatcttgtacagaacactgtttatcacattgtgattaagaaatcatatctttgtgacctatattaactggtgatctatattaacttgagctgatacatactaaaatttaaaagtccgttggcatctttttttttaaagtgaaagatttggggaaggaacaattgacttaaataactaataagtatcatcatgaatgggaaacacttgagcataagctgtaaaagtgattattgctgaatcacttaggtttttctcaagcctttgttgacactgttagtgacagccaattctctggctcacccgaagcccagcaatgcactgagcttccatgtttattgcagtgtgcagtctttggagggactttccttcaggcctttcctttaaacagtctgacatatcagagataaattctacttggcctttccacccctcagtagtcattattgtttcctgcattctgcctatagctttgactttcattgttttaataagtgttgaattgtttattgaggtgaggtggttctgtgcatacagttttaagtcacacaataaattcaaatcactattatactagatagatggatcaaaagaccaacaggtgataggatgagaggatgtgcactcagtgctgtgtgtaaagacaaaaaaatatatgatagcacataccctggttattactgtttggcccatcctagatccacacaatagagtgtttagttgactgtctctgaagccctgattatccccttcagactgttgcggtaaatttttccaacccaaatatgccctggcaatgaaaacacaactcagttaacatgaatacacgctgtgagactagattgggcagatctaccattacattaccatcttccacatctatgagaccccttagaacttgcggttactaaaggccctgtgcttctgctctgcttttcttcttcttcctcctcttccgtatcatctccctcttacattttctccttctcttcccaccttcctctccaccttcccttttatctgcccaatcatcagctctcctttattttacaaattaaggtgggaagcaggtttacaggaaatcacctgagtgctgactcattcctcgttttcagccactcacaggagaacagaattatcaaatataattagccccagggctatccacaacatcagacaattaaatattgatgggaagtttgatagactagtctttctaaggaaaagtggatcgtaaatatatctaaaggaaaatcaccagttttgagtgttttatgcagagtcatgaaatgagaagggtgcccaacaatcaaaatgggaaaagctgagatgaagaaggaacaggatggctcaggggttaacagcacttactgcatttgctaagtagtttcagttcctcatgattatcatggctcacacctgcctggaaccccgattccagatctttctgctggcctctgaaaccacaggctcacctatgtagtccaaactcaatgcagtcaaacgcttatacatgtaggacaaaaggaaatcttaagaaaaataaatttggacttgattacctgccataaatgtttcctcgattcagttggcatttaatgagactacgttaattactctcccaagcagcttacacccaaggaatggcgctgtatttccatttccatgtacttaatatatgctattgtcaatccaggggcacatctcctttagatattaaacaaatggctaaaccaacagacaggaattgttaaaaattccttggtttcagagaacgtcaaggccttctcttgagttatttttacaagttggattcttagaagggagctattaccagagctagccagcaagctgaccacacatgccctgacaccttccactctactgttactttctgctaatctttagttgaaaagaagtgcaaactgatcctgggtctgtagttgctaccatggcagatgattggcatcaccttttcttctgtgtttgctcatctttacatgttcaggatgcatgctattcatagtagagggcagataagattgctcactgaggaaaggtctttgaaccaagcttgacaccacaagctccattctttttattttttctttttcttttatcgaaaatagttttcccctcatataatatagcctccttctctcagtttcttctcatctcccctcccatctggatccatcctttttctatctctcattagaaaagaaataggcttctaagaaataatgataaaataagatgaaacaaaagtaacactttagagtcagagaaaacagacaaaccaacagaaggaagagagctggagagaaggcacaagaaacagagacacagttttcaaaaatccaggaatcctatagacgctatactagaagccatattatatccacaaaagacctatcagataagacagaaaaaagacagaaggaaaaaaaagtataaataacataagattaaaaaaaaaagagagataaatttaaggggaaaacaaaagaaacagcctgactaggcagcatgagacaaagctaccacagacttcattttctattggctgtttactgctgggcatgccatggacctcattgtccattggctgtttactgctgggcgtgtttgtatacccactgtggctcgcttagagggaagtgatcttatgaatttcattctaaacaaaagggatggtctgcaaattttacacatatgcatatacacatgagcacatgacacccccccccccaaccacgcacatatacacacaaacacacatacacatatatacccgcgcacatgaacaaatgcataagctcagacacatacatacacaggtgcacacacatgtacacacacattcacacacactcacataaacaagtaaatgaaagtaatgattttttattttaaagaaaatatgcttaaaaagagactcaattcttgaatctttagtttccagttaagatactctacagaagatcctttggggcctatcagcagaaacggatgacttaccgtgttttaactattcaagggcaggaattatgttctcgtgattcctaaattagtgtggtaaaattatgtctaacggtctcaagggagcatcagtttattatgtcaacaaaattttatgctaggtaaaatgagctaaatacccaatcctgcctttccctaagctgcaaaagagttaactagaatccactgatattaggtcgtatctttctgctgcacactgatacatgttttcatctctgactaacaagaggattctaggggttctgccatgatgtacagagtatgaactgtcagtgccccaagtgaccttgtatttcactaaaggagctaaacaacaacaacaacaacaacaacaacaaatttagttttacagggactgaagaagtgagttggtagatatgggtaattgttgcacaagataggacctgagttttaatctttaccttctgtacagccacacacatggctatcgctcgagtggtatgtgtggtgagataggagatttgttaggcttttctgagaaacagctagctttggttaaatggatttttagaataattttacgttggacataactttctacctacaaatgctgcttcttctactatagtcatcccactcagatctcccagcatcctcttctactatagtcatcattcttagctatcccagcatcctcttctactgtagtcattacacttagctatcccagcattctctgagtaaacttcagtataccaagccatcattcttgtcaattcattatttcatattaaagtttgatcatattgtgattttcatatagttttaacattttaaataaattctttgtttatttttactgtagccattttgtgagggtgtttaatcaacagaaattatgctaacaagttataccacccggtacattttggcggatagttcttcatagctctcagcttcagtttgccctgtaatcacactagctacagtgttttcttccattttcttcttattccccttttctttctgacatttggtgaattctatactccaaatattgttccctttaaaaaaaagtgggaaaattaaggttctcctctaatcatacattctaaagtttctcgtcaattgaactgtacattcaatgttacatcattatccattctcactgtgatgtcctcaaatatttcctatcaagatgaatcatctccattaacatagaaccatgcttagggatttctcctcttaacaacacaaaacaaaacaaaacaaaacaaaacaaaacaaaacaaaacaaactctcctttgatgtcatatgttcttagacccttcatttaattcctgtgtattcactcatgcttcttttagaaggtcaacaccttttctcctgtggtcaagtcccagaatggtttcagttctgctagctccatctcagccctctggcctccggggcacagaatgctttacagctcagtttgtccagtagttgaacagtattgattgtgatagcttccctgcttctttcaatccttgatctctctttttctccaaggtagagttgtccttttacatcttgtagttaatgctatctgtaaccttgtccttttccactcatctactttgttcccagaaattctgagacttaataattcataaataaatgtcgatccaaaaactttgtttgttccccagctagctcataacttaattatccatttattctattctaagtcctgccacatgactgataattttatcctcagtttgactttgtcctcagtttcatgtgaccatcttcttctgcgtctggagtgagtctccttcattcccggctctcttcccataaacccctctctctgctggatgccccaccttgtaatcccacattggccaataagcttttattgacaaatgaatgcttttgtacaatgtataagacatactctctacaacatccctacatatttatatctctttcaggttcttgaccttctcttcctctttaactcagtgccattgaggtagacagtacgggggaggtaggaagtcccagaagctcaggctttcaggggcaataatgctcaaattcatgtgaataattctagtattggggagctgaagcaggctgattttacatttgaggtgattctgtgatgtagagttgagtctagcctaccttgtaagacagtatctcaaaacaaaaatgaactactaatgtttatgtaatgaagcttacataaggaagagaagtcagcaatacaagagtgatttaaattgtttgtaagacggtagaatttgaagatcaacatccacacttaaatgattggactttgaaagtcttttgtgtgatgagagatatgagaaatattgactgttgaaaacttctgtggttaggagctttagtcacatttatatggatttcaaatgaccagtttgtcattatttcagtctgcccctttataaatgaaggcaatggctaattagtgcatttttcttttacactagcacagtttcctatttaaaagttcaaatcacaaaaccacagatttaagattgtgagagtaaagtgtcagattattttgtattctttggaaattgactgtgtgcttcatgttttgaagagagaagattaggaggaaatttgacatcgaagcatttgtctttaaaagatgccccccccccccatatcgctgcaatggcacttttcatatacgagtctctgtaggccaggatttgtgctgtttcatattcattatctcagttaatccttcacaaagctctgaggtagatattaatagttcctgctataggagaagaaactgaagtttaaattttatatgagctaaagctatataagttaatttatttaagttttttttatgattcgaagtgataattaaagaacgtgaattcaatatatatctgagttgggagcttgagcatttacggcaaggacatagtgaaggaaaattacgagtgaatgttattctcatttctctagtgctcgcagtatcttacatggcctttcatacattgtttcatcgttttccttataccattcagtcttcacagggatcttgctttttaagtggatcagaggtgtccaggtgaagaagctatacagcctcattttcagctagttgtttgaggtacacagaacaccaaaccgaccactagatgcaagcttgctaacaccaagtttggcaatcatgatgtgagatgtttcctcctctctattaattccatttgcaggaagataagattgtccttcttctgtagggaataccactttacactctcccactttaattcaattcatttatttagttaataatccaggaatgttgctggattagcagaaatgtgattagaatcatcaccttcagtatttcaggtaatggagtggaggagaaatagcacaaaaggcagaacccatgcaccccatttccagggtgcctccaaggacaggttcacactgacatctggcgtggcttctattgctctcctcttcctggaagccccagtcaaccacttgacacccagcattagctctgacccgaagatcagcctcagcaagctacataattaaactgttgggatttgtttcccctgactggacagaagagcctcccaaggtgaggactgtgaagtgataatgctgattctgactttaggagggaaggaacacgagcgcagaaatctcttgaagcttctgttaatgaggcacagacggtacttagtagagaaaatgaggttactagaaagaaaacttacccttttcccctctttgataaagagccaatcattgcgccttcttttgaatccaggcctaaatttattgtcctgaataaacctcattttaattaaacaaataagtttttctcaagggtgtagtaatcttgcttaaagtcacatttaaggggaacgaggaaagttagagtattaagaagtagcactaagctgtgtcttgagaagttgaaatccttgaattggttccgacaaccacaaactgaaatagctacaatgattagccgtttgggatcctgtgctttatttgttaaaatatgttttaagaagccagtattatgttttctttgaatacttactctccttgaaacattattcaagcaaatcaaacttattctcccaggatctaacttcactgccattgcatatagatactacaataatagtcatgatgaccatatactactatttaaatttgatcataaaagtgatattatacacctataatattcatgttgtgtgtgtggggggcttctgatctctgtgactttcggaagagttggggactaggacagcttaaggtcctagcatggccttccatgcttacaggccagccctgtgtctcggtgcctccatgaaacattatttaactgtttatattctgttttctatttcttaccaaactcacccctgttcatgtctcaaaccaatggagatgtgatgacattcatactaaatacatttgcttgaagaaagaatcatgtgcctgtgagggccccctctcaccttcactcccaattccgtgctcatgaattaactgtctttctctcctgaaaccttttttccctcatataagaccacattgtctttcagtttcgctccgttctagtgaattctatagtcacaaagaacacagtggaaacagagaagactgaccaggagaggttgtggctggagtggatgaaataaagaggaaccacatattcctgactattttttccccatttttattgacttttggcaggtgcagggatatggcaaatgaatggggtttcatgttaaaaactctgtcgttctgccccataatatctcatcagtgtactcattgaaatggcaaaaattttttaaacaatttaagtgtatttaaacgttagattttttttcaaagaaaactaaagcctaaactctatttcagtgaaatcccctggacctgttggcttcttcctgtcaggaagttatctgatgaacttaatggaaatccactccaggctgcagggcctggtgcagtatggctccctctgtctcttcctgttctgaactcattttaaaaatggagtagtggaaaagtatatagctatcttaatgtggctgtaggaagagtcactattccagttatgagggagaaacggtagctggaggccagtccatggtattgggaatcatctgggctctccagtttgtgtctattagatggacagatagctgctgtgttctgatcattgtaactcagctgatttaccaatcagtgttttgccagtgctgacatggccaagcctcctgggatctctttttccctagccaccaggcctgggtccagctctgttagaattcctgctggctcccttgtcagccttgacttccatggcagtgctttcttctctccccttctcttcccttcccttctcttctctgcccttttagtctgccatcttgccatcatgttagctcttagctcatttccttgcagttcagttcccttctcttctgacttacccattcttcctcagagctgtccagttatacatagctaagcactctcccctgtaggtgtcacagggaagtcagatttgaaatagtaaaatgtatttggtagtgaccttgaccttcaagtttgtgtacagtcctttattactgctctgacttggttcccatccgtcagccagtagcctacactaaaagccattgacttcatctgtgtttctccacacctcctgaatcagcatctctgtcctgcctgtttcaatataattattatcttttccctttggttatcatttaaattctatcatacctactagaaactgcctgtttgctccttttggatagtctcccacctaataaccatgtttttccattagcctcattttatattacattgttactttaaacataaactcccatagcatttcctaaagtggttttcagaataattcacaaataatctatttaattccatgaataaaggagtcaagtagaacattgaattgctgaatactaaatctgtttttttttcttggaaaattgttgtaccacacattattttaagagaaatgactgaatacaattttgttaaatataatgtgtgtgtgtgtgtgtgtgtgtttgtgtttgtgtgtgtgtgtgcagggtggggggattggtgtgggtgtgtgtgttgactagagcaacaaaactctacaacagagcctctataatttttttttcctgaaaactgataatttgggacttttgacaggttagtgtcctgagctaattggcaaattatcacaaagtatcacaaaatcttgcaatacttgctagtacgtgcttaagcatattggaactttgtgaacacagcagtttagttactatgcaaactctactatggttatatgcagatggcttaagaaatcaaagtctagataaggtatagctaaaagtttctaggagaaaaaaaatcggattttcttttagggcgttataactatcatctactgtggacattctttaaaagtgactgttgtaaatgttttctatttcttcctgacaggtaatatttgaagctgaagtctcaggagggagaagtggttatattgccattgatgacatccaagtcctgagttatccttgcggtaggttttgattaagagttgtatttttctgtgtccttttaacacatggccaggactggcagaggctgttgatcgtttattgcctggccattgttggccattttgttgttattcccagccttcctggaatagaacaccaaaatgcttagtagaattttcaaatcaaggatttttcagacttccaacgacatgcatgataggattctttcatttctttttgattagtgaaaacaaaaatgtaagtgcaaacttcattccagtcagatgttttaagctgttgaggtatcttataattctataggggaaaaaaataaacaaaaaacaaggaacaaatctgagttcaataacagagcaagcaaacgctgccttgtatttgatctgctaagtttatactggaagaaatgaagaaaatgaatttactcaactcattctgaatttaggtctgcatttttttattattattccaaatgtctgagttaatcagtattaaataaatgacctcaaattcagtctgggttaattgactccatcttgtgaggtccttgttcaagcactcattgtttctcagacttcatacttaaaattgtgcttaaccacatcccccaaaacgactatcgctatcattcagtagggtcaggcagaatttacagacagcagtttacacttccttcatgatatgatttcccagcagaaaaatgtgataagtcctgtgtaagaggacttcgtgttccatagtcctccatggtgagccatttctaatgcactgaaaaaaaaaggatttatgatgtcagcatgttgggagcaagctttgtaccgcaactgagtggttatatcatgataacagagaacacttaggctggctcctttctggataattgtgtctagactggggcctgtgtgtgatatgcgtggaacggtcacaacctgatcctgctccaagttcaagttagcttagtaagcttgtttattccacagtgcaactgaactttatatctctccgccttccatgtctacacctcatgtatcagatgacaaggaaaggcttttgtgaatcaagaaattgatggtcatgaattgggcagaacagtcgccgttccagggtgattggtctcttgaagatgtttctcattgttcatattcaccaaggcttaacttggcctgtgtgtatttttcttcaatggtaaacacttgacgggacttcagattcagaaggaaatttgtaccaagtactgattggacagtcaaatcacccatgcgaaactatgtgactacagacatctcctttgttgctctgatcattctttggataactttcccatggctataagcaaacaggaaggagatactccttttcttttaataaacaaaaatgtcttctctgatgtacagctgttaaggttttttaaaaaactgaaagaacggtcagcttgtgggtgtgtagttaaatgtccccatagctgtcagagtgtgagatgtctttatatgcaccaactctgtttcccattagactctgatcggaacttgtttcatcaagcctgcttactttgatataactgttattactatgcattaacctatgctatggcagctattagaatatgcgtactagctctgcagagtcactctgcatcgatccatctcgaaaaggatgagttactttgtatgagacctgttaagaaggaaaactgtgagtgtaaggtaggaagcagcgtggtctagaagaaaggaacgtcaagttctttctggatattaatcttaagggtaggcttattaagaatgatattcttttgtgacaattagcatggcatgtcttttcttgtgaacaaaacatgcatttcccacccacccccctttttttaaacagataaatctcctcattttctccgccttggtgatgtggaggtcaatgctgggcagaatgctacatttcagtgcattgctacagggagagatgctgtgcataacaagttatggctgcaggtaaggccctgtgagctgctgagctaaagggatcacttggtttaaaaaacactgcattgtttgtggttgtgacttttctctctcttctcccgtttctgtcccatgcacaagggcaggctatttgtatgcgtttgtttggatgactggagattttaaacacacccttcacttttaaataatccaactaaaaatgcatgtaactaattgatactggccttggggtctagtaacactcagtgattccctagtgtcaggctggaactctaaagaaaaattctctggatactttggaaaagcagtaaaaatgaaaatttccttcctttcttctttctcccccccccctctctctttcttttcttttcctttttttttttttttttggtggttcttttttgttgttgttgttttttcgagacagggtttccctgtgtagccctggctgtcctggaactcactttgtagaccaggctggcctcgaacacagaaatccgcctgcctctgcctccagagtgctgggattaaaggcgtgggccaccacgccccgcgcaaaagttttcttaataaatattttgaaaagtgaacttctaagaagataatatttatgtgggaactgccagacatttttaggataagaaactaccatggacacacacacacacagagggggagagagagagagagagagagagagagagagagagagagagagagagagaatgaatgaatggaagagaaacaatgtaaaggtttctttgtttttgtttcttttgttcttttctttttttctttctcttttttagaagtttgtgtataagagttgctagtagatctcacatttgagtatctcccttgtatatgttaagtccttaatacctccttatttaattgattataattgacatagacgttgttggagaaatgtatatgtcatgaagcttccagggcatcagagaaaaatctgtagaattgagaattgttttgccctcgtagaacgtgttaaaggtgttgctgtcactgttaggtgctggaaagagggtcacggtgcaaagtgtgtgccaagtgcattcctaaccccagaagactggagctaggaaagttgcctgtttagctgactgtttcaaggcaatttttttttaacaatgtctttagcatctagacttccatttttcttctctgtgtgtggagtttaaataggtcgtgtgtagatgtcatgagaggtgcacatcggggatcttctttcattgttgtctacattgttttgagaggagatttcccattgaccctgggaaagctttcacagtgcctctgagctggaggtttgcctgcctttccctcttcagcactaggcatgtgctgccatagtcccctgtctgttggtgatttttacccacccctgacctgttagtagcctgtttctttctgcatcacggtaaggaaaaggctttagtttctttagaattttaaatacctgagaatcccaggacatttctaaaagacaaacctttaaaggtcaagttagctttttgagcatggacatcatgatttacttttgctgcatccttcagaatagtgcagttagtgctaggggtccttattagcttccccgtatttagggatgatgcttctagtgcatcatcattaaaagcaaatttagtataatgtctccaatgatggttacagggattataagtgtcacctgattcctctttcagtccaatgagatatgaccagagatgtacctcacattacattagcccacaaatcactactttggtaatttatttgatttgtagttattataatactttctgtttggcccaaatttgaaaagaaaaaaaagtgttttttttttctcttgtcatgttaatttttcctacctatagtttttgggaattagaatatttgacccaagagcatattatataagctacagtctatttaatgctgaacccattttctcatactttcagtctgtgagtggtttaaattatttcaatcctatttcctcatttttttttatttattttttttttccaatgggaacgttggttgatatttggtcttagctctgagtctggtcagcccactcttcaggaagcagaaatggctcctcagccagccactggttttatgctccaggatttaatgtgacattgagataaaaagggtctgtatccgaagacaccagctggcttgtggcaacaaagcccttctggaccgtgctggtctgagtaggctgccgagaaaacactgctcattttttctcgtttccttccctgtggattggctcatttttattatggtcttttgatattccttctgccattttctgagcagtgctgggagaaaatgctctcagagagttttactctgtttctctctcccctccttggagtctcggcattggctgcacaaggtgattttgtgtttgtttccaacgttgacatggttgtcacatggtccccagcctgcacattgcatggtctccagcactgcacaagtttaccttgctactttctcaataatgccacataaatttccttaatatttttttgtcaaaaattcttctttacactccaaaaagatattaaaatataccatttacttagtttagtcatgttttcataaaaacatttttaattaaaaaacttatatgtgtgttaacctttgtcattttttgagacaggtctcagtgtattgccctgcctttcctaaacctcactgtgtaaatcaggctggccttgagctcacagaaatttgccttcctgggcttcattagtgcagggattaaaggcctacacaggcttattttgcctttttgtatgctgtggatcacattcatacttggttctgcaagccaccagaagagggaatctctgggattggagttataagatagatcaatgtcagctgttatgtgtgtgctggacattgaacgcagtttctcaggaagagcgatagtgttcttaaccactgagccatctgttcagtccctgaaataaaacataaaacattttcgtagtggcgatagatagcaattaatcacattggactgactgttccttacatgtgtatgagacaaccaaaaactgattattacttcaaaaactattcatcctttgcccaaagtcgtaaaaccacaggtaaacaggaagaactgtggtcccaccatggatgcctctactcagtcgttgaaacaggtaccaaattatttttatttcctatagaggacaacatgcgaggggtcgggatcctcaactctgactgcatttctacccttttggaacctagttaatcgtgacaggcttagatttcattggcccatctgggcctgtatttccttatctagaaaagaagatgtttggtggaaactaaaatcccttccacctatcacatgttaaattagggctctatattatttgtgtggatctgaaacatgaccttaatgacctccttttatttgatgaaataatgtagaaattttaggctattagttttatatgaaaagaaaggagctcttaaattaactttcattgtaagaacaagtacggaaaatgtctgcccagagtccgaagaaggaatgtacttgaatccactcagttaaaggtttcccattctgtcagaggaagtggaagagtaatagggcaactaccatgtaatagtaatagtaatagtaatagtaatagtaatagtaatagtaatagcaatagcaatagcaatagcaataccaaaagcaatagtaatggtaatagtaatggtaattgtaacggtaatggtaatagtaataaatagtaatagtattagtaatagtgctctaccatgggacaggtgtaataataagtgatggacatcctcctaggtcctccacacgatcacttggtagtgcctcagttagcagaatggcttgatatgggctaaagtaacaaaagctacagtggcttccaatactcaaatggaaagaaaaactacttgccacacccctccctgaaaggtctttacctgattcctcatcatagttgtcctttcccgagttcccgtgttcaagtacacctgaagcacacgtttttcctctacgtgtagtttgcaggttgtgctgctcatttcatctcagtggggatgcctgttaggtggattgagaggtgatggagaacataggatgttcagagatattaaactaacccacaacacttcgcaacctcgctcatgagggatttagatagttaggtaattaaagattttgaggttatttgatgtttgaagatagttctgcattctagatatatagaaaattataaaaaatatgcagctcagacttacgtccttgtccacagtgaataaacccactgtccataatgcagtgtgtaggaatacttttggaaatggctgacagtgaacagaatagaagcagagtcaaattatgagcctttctgggagaaagtttttaaaatacgtattttcatatctataaaatatactttaagatattgtaaaggagacataggataacgcctgtcatcctttgtaaagcactttcctctcctttcaggaagcccagtgaactcacatgtactcgaggcttaaatgctaaacagttttggcaaattatcgacattaattttttgtacatgttttttattcccagcactatttaagcttttagttgtatttctaagaaactctcaattttagaaaattagtagttcacaataaaaggcttatgatcaggttacaagaatttagaatgacagtagaattttacatatatactgaaatcatttttgaatatcagcccgaatttgggagacaatacagggaatgtttatgtaggaaactaatatgaggttacatcttttataaattgatgttgttcatgtttcttttttgtgcttttttttaccccaagaaatataaatatcagttaaagtgattgagaagaaagtagataggacttgggtttattcagctcagttgatagagtggttgcctaaagtgtatgaggctctgagtctcaatattcagtaagcaagacaatgattagcaaattcaagtcaatctaggttaccatctgtcttagtcagggtttctattcctgcacaaacatcatgaccaagaagcaagttggggaggaaagggtttatttggcttgcacttccatactgctgtttatcaccaaggaagtcaggactggaactcaagcaggtcaggaagcaggagctgatgcagaggccatggagggatgttccttactggcttgcttcccctggcttgctcagcctgctctcttatagaaccaagactaccagcccagagatggtcccacccacaaggggcctttcccccttgatcactaattgagaaaatgccttacagttggatctcatggaggccttacctcaactgaagctcctttctctgtgataactccagctgtgtcaagttgacacaaaactagctagcacaattgaccccttgtcaacttgacacacaaacacatcactagtaagcctcaacccttacattcttattcatccccaaggtctaaataactttaaatgccccacagtctttacatattctaaaaatttcgatctctttaaaatatccatcttttttaaaatccaaagtccttttacaattaaaagtctcttaactgtgggctccactaaaatagtttcttccttcaagagggaaaatatcagggcacagtcacaatcaaaagcaaaaatcaatctccaaccatccagtgtctgggatccaactcacgatcttctgggctcctccaagggcttgggtcgcttctccagccatgccctttgtagcacatgcgtcatcctctaggctccagatgcttgtactccactgctactgctgctcttggtggtcatctcatggtactggcatctccaaaacactgcatgaccccttcagtcctgggccttcaattgcaactgaggctgcaccttcaccaatggcctccatggcctctcacagtgcccagcctcggctgctttgtgtgaccccttcatgccttcaaaaccagtaccacctgggtgacccttacatattaccaagtcccgctgcagcaggagtacaaccttggccatctctggaacacagcctctttgtgctttcagaaaacacttcccagaagatgtcacctcaatgatgctggtctcttcttaatcaccgctaatttcttagctccagctaaccagcatcaatagtcccagtaatgcaaagtttttgctttagtagttctggcatcttgttaatcacagctgattcttcagccccagctaaccagaaccacagaatcttcacaatcaaaacagcaatggccctgaaaagagtctttaattttccctctgaaatttcacaagccaggcctccatcttctgcactgttttcaacattatcttacaagctcctacacaacatctgacagagctcttaacactgaatggatcttctggcccaaagttccaaagtccttccatagtcctccccaaaacatggcctggttgtcacaggaataccccacttctggtaccaatttgtcttagtcagggtttctattcctgcacaaacatcatgaccaagaagcaagttggggaggaaagggtttatttggcttgcacttccatgctgctgtttatcaccaaggaagtcaggactggaactcaagcaggtcaggaagcaggagctgatgcagaggccatggagggatgttctttactgacttgcttcccctggcttgctcagcctgctctcttatagaaccaagactaccagcccagagatggtcccacccacaaggggcctttcccccttgatcactaattgagaaaatgccttacagttggatctcatggaggcatttcctcaactgaagctcctttctctgtgataactccagctgtgtcaagttgacacaaaactagctagtacaccatctgcataggtttgaggctagcttagcatatgtgtcacttaactccaaaagggcagagagaatttaaaagccaccgaccaacatgctgcctctgcatctttttacatattgactcaagagatattaaggcacttcttaattaatatattaagaatgtctataacatatttattcataatatttaataacttaaaatttctaagtatccttaacaggagaatttatcaacaggttggtttgctttcaagcaataggatactgctctagtgtttaacagtaaaaacctgaactgctggtgtgtgtaacagtacacatgccatggattttacatgtatggaatgccaccaccatgtattttaaataggggacagaataaaattaattcagtacatatgatcacctttgcattaacttttgaacacagaaaatgaggagttaaaataatggcctttaggaaaacgaaaggctgaaggaaaggctatccagagactgccccacctggggatccatcccatatacagtcaccaaatgcagacactattgtggatgccataaagtgcctgctgacaggagcctgatataggctctgtcagagcctggcaaatacagatgtggatgctcgcagccaaacattagactgggcacagggttcccagtggaggagttagagaaaggactgaaggagctgaaggggtttgcaaccccatattaagaataacaatatcaaccaaacagacaccccagaggtcccaaggactaaaccactaaccaaggagtacatatggagggtcccatggctccagctgcatatgtagcagaggatggccttttggggtatcaatgggaagagaggccctttgtcctgtgaaggctagatgccccagggtaggggaatgccaggacaaggaaacaggagtgggtagatttgtggggggatagggggaggagaatgggataggggatttagggaggggaaaccaggaaagggggtaacatttgaaatgtaaataaagaaaatatccaataacaaaagtaaaacaaatattgaaaaataatggccttttcatgactttttaaacatttgtttattttatgtatatgactattttgcctgtatgtcgttatatgtataccatgtttatgcttggcatccatggaggtcagaagagagcattggatcccttggaactgtagtgacatacagttgtgagtcacattcttggtgctaggaagcaaattcaggtcccaattgcctttaagtgttgagccatttctccagccccaaatcctggtcatgtataggaaatgtgaactagactggcactgagcaactttctggggtgccatgatcatgaaagaacgtagatgaaactttgggtcagtgggtgtgctcctgtaatacaacagttaacacctgctcaatgctacagtatacattttaactaaagaaagaaaaatggggaatactgaacacaccacacttgcttttctagtgctccactcactgactgaactcatcatcatattgatggcaatgccccaatctttgtaaatcctgccacctaaaatggttccattatgctccaaggtaatttgtaaccattaatttcactaaaatataaaagaaggttgtccttggtattctgaggataccttataatttacgtatagaggagggttgaaacgggtcatcctgtcatgaataaatggcagttctttcatgaaggtccagtataagtggacagctacatggcaaatcaaatagagaccattgctggaacatctgtcagaccatatgctttggcttcaggttctgtgtaaaaccgaaacgctaatgacgccatccatcatcacagagcttggcaggcaggcatcgttgaactgggcatagaaattcatgagtggatttattgaatggagcgcaatacgtgcgttggtttggtggcaccatttgttttggtgagttcaaatgaggctgtgtaatatgttactggtaatcttatgcagactgtagtcagagccatggcaattgggccaatctgtcagtaatctctgcaggcactggcctggtgcctcttcagtggacctgccaaaactagagagtcagccaccgctttgcccttggtgagtgaggcacattgctgctaatgtcctgtgatacagtgagtttctcagccaaaggaaatgtcattccttatggagcaacagataatttaggcaatggcttgagagtagtaattggagagtgaaattagtaaaatgagatgcaaattgctttgcaaaacaactagagagaggctgacctcttcaagtcccagctgttgccagctgtgagtcaataaaagtggtggatttgaaacttctggtcatgtagtatttaaaatggtggctcagttgccacaaatgcctccctctactgcacatgaacatttacatgtaagtgaaaatatgagacctgagctttagaaaattgaggggtaaatatgaaaaatcttcacctgagcaactgcactcctgcccagtccaaatgcctatttgctttcagcggtttcccgaagcattgttgaaggctcctctccaccatcctaggaagtagttggaacttatagcataccccatttctagggattttactgttcatgatagatactatttcatttagagaaaatatcttgaattttagcattaattataatgagaaaagaaaagctttctgaagaaattgatcaacattaccatagcatagtttatattgcaaacttcatccagaaataacttgaagggtacttttcaaagctaacctgattgcatatgttaatacctggtcagttcactctataagacattggaaagggagaaatgcaatacattgaaaagagtctggaggtcagaagtttcaaacttctgacatttatagataattgatttgtaaactctcgagatgtgcatctgaaacactagaatagcaaagatagcaatgtagttattaagacaggaagtaaatatgaaaaacggatgtcagaatgattacaaggatatctatgctgattctattacctagctatttccaataaagcatcagtgaagatgtatgtgcatgcatctctatagaaggatggagaatcctttgtgtatgtgtccaggagcagcatggctgtatcatatggtcacttttagtgcctacagtcgatatggtggctaactgttctctttcccaacattctcatcagtagttgttatcatttgttttcttggtgctacctgttttggaagtttatggaagatgaagtgagatacgtaaactctcagcttttaggggttaatacaagcaccatataatttactctttatataaccccaaaatgtagtaatctggtcttaagttttaaagctctgtgttcaatcatatgaactgatttgaattctgagccctgtaattgtgggctgctgagacctgaacaagctgatgtaaagccgtgtccagagcctagggatccaggcatgttccaggatgttcatgctggagaacagggacctcaatcatttcagagaggaaagtaagcaccaaagactggggcattgggtgagatcattagagaaaccttggctcaagagctggaattcagcaaacacaagatgcacagaaaggaagatctgtaggctgttgctatagggttagaagacacaacacatccgttcggttgagtgaagtggagcagccatataagaaggatctcattgagagatcacggtgagaaaaggtggtaaataagatggatgatcaggtaaggacatgaacggaattggaagtagcaacagctgctgttggcaggactgacatcaggcaataaacgacacagactgggcagtgcagtcaaattggaaagtctgcgggaggcacagattaaagaagatgaatggttttggatccagtgggtaacagttaacagattttggggaaatgtgaatgctgtatagtataatcctctaagcctcaaggttttacttttatacttagcctgtttctcattttctggcttgaactaactggtcattagaaccattgattattttcattccttttctaccttcataatggccttcatacaaatgatcttaaataagaataaaggatgagacattctaatggattttggcttttataccacagtaaggtttgctagtatagttacttaaagcctttgatggtcttcatgttgtctatgagaatgaactttttggaaaacgccagatgcctctcaccttctggatgcttcagaatcactgttctcagaacaggagtaagaatagttctttctttcatagtgtcctaacttcgtgttgcctactgttgacctaagctgatagacggagtctagcctgatatttaattctaattgtctctgtggactttctcattaaacaatagtgattcttctaggcatctctggctttacaccgaattctgttccacccaagaggctttgtgctactactagtagctgccacctaatatagccagttgtttccccttgggtcatttgatttttatagttcacacattgtagcctgccttcatgtctttgttataacgcaccttgtgtgtaacgtttgagataaattcactaaccatgcatcatggctcaagaagtctgtctttgatattttagcatctttagatgtgtgtatgtgctgtgagcattgggaagattcatggtatgtaaattttagggatattactctttttgcatttgataatttcattataaagtttagtaccatagaatttttaaaatagttatataacctaggtgaaatatccaaaattaaccaggtattataacagactaatgtgtgatatgtgttttactcccttatcttcttccaagatttcttctcatcaaagtctataaataattgttactctttgcatgatggtaaaggcagtacccacacaatgggtgtggaggggttccttcggagtgttttcctatcagccatttcacaaatttcccaataagccacagtgttatatatatgtatgtatgtatgtgtatacatatatcagattttgacaaaacgttttcttctttccattgggatattttgatattctcttatttcagttttggttccttgtttgttgttgttattgtttcatttttgttgttgggtctttttgtacttaaaaattgcttatttttaacattagcgttcaaagtaatatatttcattgtgctattttcaaacatctttgttgattctaccaatctgaaaggcagatcaatatgtagatctaatatttatgagatcactttatagtacaataaaacatacatagtgaaagccatcctaattaaatatgactctgattgggggggatagtgagatagatagatagatagatagatagatagatagatagatagatagatagagaatgcttgtatgtatacttgtgcaaaaatctagagcagacttctattactgagctacatctccagccatcactgtcatgacattgaaatatgtcactgctcactgtaatgtggtattagtgacttaaaacaaacaagccccttaatccttaggtctttcctccctttcttttcctcattgtttacctattaagtactccttagaccttttatagtataatttcttagtctttgttttgccaattacttgacttcaggtcaatatggttccattttctctgtattttccaggaatttgcaggtgggtctgaggtcaaatctgatcctttgatcatagtataagtggtgtctggtgtgatagcaaagtccaaatggtcccatctctccttctcttagcgctgttagtccttaaaatccttaataattcttgtcgaaaatcatggttttaccaaacccagacactgtggcagatgccaacaagagcttgctgacagaagcctgatatagctgtcttctgagaggctctgccagtgcctgggaaatacagaagtggatgctcacagtcatccattgggtggagcacctggtcctcaatgaaggaggtagagaaagtacccaaggagctgaagggatcttgtagccacataggaggaacatcaatatgaactaaccagtacccccagagctccttgggactaaaccaccaatcaaagaaaacacatggtggaatttgtggctctccttatatatgtaataaaggatggcctagtcagtcatcaatgggaggagaggccctaggtcctgtgaaggttctatgctccaatataggggaatgccaggaccaggaatggaagtgggtgggttggggagcagggggaagggagagggaatagaggatttttggagggaaaactaggaaaaggggtaacatttaaaatataaataaagaaaatatctactaaaaattgaaaaacagcataatttaaagtatatcctgcaaaaagaaagaaaatcatgttttttaacctcatttttcattttatttcttttctgtttattttgtgatttgctcatttttaaaagactcattcaaagtagtatacttcattaatgttatttttatacataataattttgaatttcccatcttcttctttgttctttgaccctctttctaccctcccatgcctctgctttcatgtagcatgcatttgaaaacactccagtcgcatatcctgccatggctaatctccatttcaatttgatgagatctgtaaggacccaggagatgcccctgaaatcttggcttcatttgttagttctcagtatggcaagttgatgctttgttgtgccccaaagaggagtgcttccgtttctttcagtgttgttatgaacacctaactttaaaaatgcactgtgatctcagaattccctggattctatttttaagcatcagctatctagtttctgggctctatgacgccatcttatctcctgagtcccctaactctgaccttagtaatcttgtgagtttccttgcatctggttttagggagatgttctacaattcctgtcaatcaggaatcagactttctgctatgctgtcccttttcatcttttaattgataaaaggtatatcaagccaataatctaggcattgtggaatttccccctgctagaccttttcaatgagaaacatacacacagacacatgcacacacacacatattttaaatccaaaaatgtttcataattcatattgacttttcaaattcaagtctaaagacttttcacttaatgttttctttgctgcatcttttttttttactacccatggtttttgtatctttttttgtgtgtgttccttttgagacaggttccagtgtagctcagggttgcctaccgctttattatttcactacatagttgagaatggtcttgaggtttctcagagctaggctcaagccccattctttggcatgtggctacagtcaaaccttcatagcctggctgcactcctgccacagagaagggatcattgtgttctaggaatcactcagtacccatcttacgtgaccatgagagaatctgcagggtcttctggggtctgtagggtagagcagtagtaactgttgaaggatccagacattggaagacccccaaatcactctgtgcctgtcagtgtggagaaaggttgcgtttcaccctgagaaagggacaggcagcatggcagataagacaagagccttttgtcatgaattaaacccacactgttctagataaacctttagctgaatggccatggtagtccagaccaagcttctgtccccaaaacatgacatcatcaagctggtggatgaactggttgggcagtgtcatcaaatacctcctagatcaggcctatatgtttgttggttgtctgtgtcctgaacctccaggagaaagcaagtccacagtcatgtcactgttagacttctctgttccctggaggtttcagaggaaaaccaaagaatttacaattcccaggctctaactgatgaaatggaagggagaggatatcctgcctggattgatttcttagacacacatgccatctacctctacaataaaaactatcaccatgaaacatccagggtggagagccacagctttcattgtacacctcttcattacgtgccacatggcaaatgggatgcaggatctgagtctgtacaaacatctggattgttcagcatcagaagggagcacagtctgaaggatggtgaagtcagaggtaatggtattcagtgtgagcatgtcagggataacaaatgacgctttctgtttctgtattgatgatgggaggccgtctgtgaaggtgcatgtggattctactgccttccaacctaaacatgttattaaaaatgtccctttggagaataagacaaaagagaatgaccttagactcctgatttccttacctccacctcaaactgtagtgctacagatgtgccccaccatgcctggcattacctactctggatattctaggttttcaatgacactaagggattataaacatttcaaaagtacttgttttaatggcctatagattatttacttttaatgtaccttcattataactgcagaaatatttgatacattgtacactcaagcttagccatattttagaaattccaaatgtaatagttcttaacacacacacatatatatatgtatatatatatatatgcatatatatgaatatagaatcattattaacatatcatccataggtattatacttgcagcaattaaacatatctataaacttcttaatttttcaaataactatcttcatatgtggtataaaaaagtcacaaaatctgctgactagtttaggtatatattgttcagcagtgttaattatgttcatattgttcattactgtccaataccttgtcagctataaatgagacaatatctgagtgttctgaacaaatcgtcatttccctttcccctcttgtttccagctcccctgtgaataaccttttgatgcttcataaaagttgaatcaaactgttttgcttctcatgagtggtttatttcatttaacatactctgctccaggctcatacaagttgtagattttaatgggatttccttcatttttattttaataatatctcattgtatacatacaacatactttatatatgcattattttttatgcatataaaatatacaaatcatttatactttactataatacttgtgcacatttatggggactattttaattagggttactatttctgtaacgaaacaccatgatcaaaagcaattttgggaggaaaggatttatttggcttatgcttccatatcattgatcatctcagggcaggaacctggaggtagagcttatgcagaaactgctgcttattggcctttcccctgtggcttgctctagagttctttcttatagaacccatgaccacttgatcagggatggcttcgcatataatgcgctagaacctcctcatcaattacaagttaagagaatggcctacacacacacacacaaagactaaaagaaagctgggcgtggtggcgcacgcctttaatcccagcactggggaggcagaggcaggcggatttctgattgaggccagcctgttctacaaagtgagttccagacagccaggactattcagagaaaccctgtcttgaaaaaacaaaaaaaaaaaaaaaaagaaaggaaggaaggaaggaaggaaggaaggaaggaaggaaggaaggaaggaaggaaggaagaaaggaaggaaggaaggaaggaagaaagaaaagaaaatggcatacaagtttgcctacagcctatcctttggaggaattttctcaactgaggctccgtcctctcaaatgtctcaagtttgtgccaagctgacacgaaattaggtagcacaggaactatgtgattctttttaaagtacatataactggaaggacccttccaattttgtttttattttactttattttattttttaaaaggtcttatatagccttgattggtcagcaatcctctacatagcccatgctagtcttaaacatatattcttcatgcttctgcttttccacggttaggattataggcatgccccaccccatctgccttaaaagaggaatttctattttcccaaatatttatcatttctttatggtaacaaggctgttctatatatctgtctcaattaaggttctgtagagttacggaacttatagactgtctatattaagagaatttattggcatgacttacagtctgtagttcaactaacccaacaatagtcatctgtgaacaggaagtccaagaatctagtagttgctcagtcccacaaggctagttgtttcagcgggtcttctgtagaagtacgttccaatagatgtgctggcaagtaagtgcacgaagttgaagaagagtgaatctaccatcccctcctttacagtttatgcttactggctttgtatgagacatcatgatatcaaatgtatattttctactttttcattttcaaagttgacaagtatctttgaatatttaggccgtttttttaaattacttctttaaaaagtataaattgagtgtcattaatcccaaagagatggtaatttgccaaaagcacagatttagagttgagcctcaaacatcaatcaggattttattttcattccatggcaagctcaagctatatatttgtaataaggatgcatatggtatggttttcagcttcttgggtgatggctatcacatagggtatactaggaagcttggtagcaccagaaacaagaccatcttctttgcccattaaggactgttgttcattttctaataagccatagactcttttatgtgtttgtgtgtgtgtgtgtgtgtgtgtgtatgtaagtctatatgtatgtattcacatatatatgtaacaattttacagaaaaatgagaacatagaatcaaccatacatcctttaaaatatcccaatatcatttctttttcttgattgcatgacaaaggtaaaaatttgtggggctacacaggcatctttcatatagtttagcaaccagaataattcatcacatatattgcttgctgatattctttagatttatagcatggtgaacaacttgtttctaaagattggtttctgttcacagagacgcaatggagaagacatacccgtagcccagactaagaacataaatcacagaagatttgctgcctctttcagattgcaagaagtgacaaaaactgaccaggatttgtaccgctgcgtaactcagtcagaacgaggttctggggtttccaattttgctcaactcattgtgagaggtaataccttttactccatgaaactgcatgcctttattcaaactacggaaatgtatggacacagtgactggtttttaagctgcagtattcgtcattgcaagtcactattatatgtcattatcaaattgctgacaatgtcatgtttacactagttttaaattttgtcaattagttttccaaccagtgtcttatcaaatgatatcttgctttaccatggttattgaggtgaaatgtacactattttcttccatgtttccttatagttgtatctagcttaagagctgtcctctgatgttagtggaattttgaaggcactattataggccttattccaagagatgtttgacaataaggtcacagtaaatactctatttcaggtagacttgtaaacagtatcaatactaatcctatcccctaaatgttcactaattctggtcctttgtcaaatctcaggaagttagaatgagtttttttcttatatttttagaatctaaagttaatataaatcatgagagtttaccatattaggtgtatctgttgtgaatgcagggaaaatataggcaagggcagggtatatattacctttattaaagatttacaagtctttatgttatctcagtcagtgatttcggttgcaggaatgcagtgtagagagaatacagggatcctttcagtatggactttgacagtgactatcttaggactcttttgtcaacatagacagcattgtggtatgtttggcgacaattgctctttcaatggaagtggttttatagtgcctttgaggagttgacaactaagctgaaatgaagtgagagaaagaatgaattttaattttatgaaaatttagaagtaaagtaccttcattaaattagatatcagacagtccacactgacacatatgaaaataatgagaaggtgtgtaacatttggccaatctaatggaaactggtctctgcaattgtagcaggggaaccatttgtgaaggagtcttctctgagtgagagaaatgcaggatgagaaaaaagttctaaagactcatgtagatggggaagacattgggtaagagggatacagggagttggagagatcacatgtctaaggagcatacagctctttcagaggacctgagttcagtaagcagcacccacaccacgtagtttacaaacacctataatttgagctccaggggatccaatcccttctgtctgacctccttgggcaaccacattcgtacacaaataccctcccacagctacaaaatcactcaagagaataacaatataaataaatgcatatttagagaagaaaagaaaagaaaaaccagaaatagtaagagtcagaaattacagtatgacccaggggctgaaaagaaatgagatattttcttctcgcattgatttattttataatgcttcatactgaataattattgtcagaaacactaaagatgtacttgattctcatagattgttatttagtaattatagagggaagggaattaaaattcaggttagttgataataatcccagaaccacaataatataatactatatggagtcagaatacatacccacatttcctctctcttcatgacgacttcattctttcccatgtcaggtttttctgacattcacattcgttcattaaaaataaaacaaaagttgatcagtgtaggatgaatacagccttatcatcaatggaacatgactagtaactacactgtctcatatcacctgtttaagttcataaacctatagaccccattatttaagagcaagaaaatatgatactattttacaacctggctcagaaagatcatatgctatctgttccagttaatgaacgcttcctcatctgtgtcaaccccattttagaccctcccccatgggtctaattcattgatctgcactgaggtgtggaacaccattgctgtctctttcatttgagtctaactcagaaggcacggttgtgcttgggtattctttaggtgtttcatatgctgtgtttacagggacatatgtctgttattggtgcacctactctgcatcttccaggtatcctgtaactagcaaaatattgatgcaccttctctgcatcttcaaagtttgtctgtaactagtaaaatatatgcacacgggcacatacacttctttttttttgttttgttttgttttatgtttttttaaattctaatcctaggttttattcaacacagtcctttcactctacacaggtacaaacagccttatctaaaatgttataaagttataaaactcaaaacaaattttatagtaatgactgtataatgaaagcaaaaaggggcaatgtacacttaaggacgggcccatactgtatataccttagtatagggcaggtgatagttttattcttgtcgtttatacagataggccatacctgttcatggaaactgttgcccatttattaaaaactactagttggttgtaattacattttctctacttacagtattctttttttatttccacttcatttggtttttggcagtgctagatatcaaacctaaggtgtactcggcatgactttcctgcagttaaggactgagttgtaccactgttccctgttacttaattgttttttgtctttattctttaattggatattttcttcatttacatttcaaatgctatcccctttcctagtttcctttcccgaaaatcccctatacccccctccccctgctccccaacctacccactcccacttcctggccctggcattcccctatacttgggcacaaaatcttcacaagaccaagggcttttcctcccactgatagccaactaggccatcctctgctacatatttagctagagacatgagcactgggggtacttgttagttcatactctacttcatcctatagggctgaagaccccttccgttccttgggtactttctctagctccttcattggagaccctgtgttccattcaatggatgactgtgagcatccacttctgtatttgccaggcactgtcatagcctcacaggagacagctatatcagggtcctgtaaggaaaatcttgttggtatatgcaatagtgtctgggtttggtggttgtttatgggatggatccccgggtcaggcagtctctggatggtccttccttcagtctcatctccgaactttgtctctgtaactccttccatgtgtattttgttccctctttgaagaaggaacaaagtatccacactttggtcttccttcttcttgagtttcatgagtttttcaaattgtatcttggatatcctaagtttctgggataatatcctcttatcagtgagtacatatcatgtgagttcttttctgattgtgttacctcatgcaggatgataccttccagatccatccatttgcctaagaacatgttgcttaatttacaagtgtatttctaccatttttttccaaggcccagttttccttagttcataatatgtatgttgttttaatatcattgaaaaacaatttgtgtattccacataaaatttatttttttataaaaagaacttttacttattatccaatttgtttgctgctaatcaaacaaatctgatatcaatgatattgtattatgagtgtgtcacagggctttgtatgtcttagctagctagacttttgctaaaattatcagtatccattttgatacttttgacagttttaattattttcaacattttgggttctgtctttaataattattaatgatattctttttatttaagaatcaatagagaggagtacattttcttgtttgtccagataacctccaaataaatattgcaaaccaaaccatctccctaggcatcagttgttcttatcactaaccagaaccgtccacctggatgtcagttgtcctggtactaaaacaatgggtaaaattagcatggatgacaggtcctatctctcactggcacatttaaaactgatgtcctgctacatggacacaaaagatggtaattttaaaagaaattttgggggcagtgatatgagtagtctttaatgagagttggcatagtgttgcctgttgtcaaacatgacccatgggtaagactttattagtgcattttctcttaaactggaagtgacaggctatgcttacggccttttttattccttgtttgttatgagtgaaatttttactgcaaaatcctcatgcggagaagtattgatctctgtgttcccagagccctgagaatgtcagagctatacggtgaatagaatttactttgtcataactctagtgctgcttctgggtccttttgaattatgataacatcttccactcccagaagtccatccttagtgggaaagtgccacacccactccagtggtgacttcgtgactggcccaaaagcctggaggcaattctgaggcaacgagtttcatggaaactcagtctcctggaacatcttgtagaatgaatgctccaaacctctccttgctttagttggtgaacagatctctgtgctttccttcaatattgtttcattataagtgcatctaaggattgattttgacatatagctaagttagattagcctccatcagtattctgatattctaggaattcgttgaaccaaccttgggctttaattcttgtaagaatgttactcattcagatgaaaagccttgagtgttgacagacagtgaaagaaatcaggcattacagaaatctcagaaatctcagggctagtctacaaagcatactaaaacaacagtatctgtttcttccaaacacaggaatttgcaaaggcctaagaagaatgaaggttctaagaaggatctagagtaaatacttaaaataatagctgagtcactaccatacacaggaatttacaatggcctactgggaaggtggattatattatagactagaattggaattatggcatgggcatgaagcccttggccctgggttctaagaataagctgaccttaggtggggctgcttttgatcctaattgttaacattgatttttatcccagttggttcctgttagcttttatgtatgcattcctctgttttgtgtaaaagtcacttataagttggatgcttgctttgtgaaattacatgcagatcaacactcccttgtgtttacatctgcttgttccccctcctatttcttacccacctgaatgccgggactctgattctcctgcgggataaggggccaactgaggccagtccatggcaggaaagaggcttctgcacatctgagactaagaggagacatttttgttcagcaaagctgcaagtttgaggagtactgcctgtggagaggtgttcagcagcccacagccaaagtgtcatagatgactccatgtgttggttgctttgctccttcactgtctcatctgtcaacttttttttcgaccatcaaaattacagattagtttccatctgtccaaaaaacaccgacctcccacttagtgaaagtttcacatttagcatttcaaatttttatgatatatgtctacattttactttttttttttggtattattttgggaaactctcatgtatctcaggctattcttgaactccttggttctccagctcccaaatcctaagtgatgggtcacagacattcactgtcatacttggtgcattttagccttaaaaattttttaatcacaatttttgtttgtttgtttataagtgtcaatggtttggtttttaaatcttgcagtctattatcagctattgtaacatgccctggaaatgaaacatattcagctaatacatttatagatccttagtgactaagtcaactgtagctatgattacggagattctccgtttcgtttacccagattcattaattatttgcattctacttatttatggctgatgtttaaaattgtgtgcttgataacggtactcaaaatgataagacaatgtaaagcacgtgacacagttattggcatttttgactacaggatgcagaagaaagctttcaagttgtttgatccagtcactaatgatttcagtttttcgctgcttttaatctgatatcagtgatttgggattgcagcacaagatcaccttaccttccagtcaaataatccttgcttaccctcaggatcaaattgtctctggtcccacccaatgggtattaaaaaaaatggaatattgtaggaggggcataagaaaaaccaaggtttccttaaaatgaaaaggtcacagtaagacttgctttacatgctaatttttccaacgtaataaaataagtttaggggtctggaaagatgatacagtggttaacaacacttgttgctctggtagacgaccttggttcatctcccacccccacatggtgtcattcaaacatttgatccccacaatccatgatctcatgatcctcagaccccaggggatcagaagaggtctctcttcagacctgtcagcgccagtcacacaagtggtattcagacatacatgctggcaagacaccaatgcatctaaaataaatctaaatacatataaaataaataaatatttaaaaaactaagaatgggaactttagtggggcacagagagcttagctggatgttgggagccatttggactgttcagtggaccaggaaagaacttctatccttagggctccagagcataagcagtagattcagaggcccttattcattccattcagagagacagtaactcaggtggtattctcagggaaagtaacacatgacctccaagcacatatggaatttggaatatgtcagtgttggtgaacaacctgccgtactagctgagcagtagtgtaaccagaactaattgtatgtgttgtgagattttttaactattatttagcactaacacagagttctgggaatgttaaggctatttttactctagttatttattttaggaatgagcatggtcattatgtaaactctctagctttggcaagattaactacacaatggtttgatgccctgaggttatccagactgactctggatgaggccagagaccagacgaggagtccctgctccctgcatcctgtgaaatggcaaaggaacttctttgtgattttttgagacagggtttctctatgcatctctggctgtcctagaacttgctctgtagatcaggctggcctcaaactcagaaatctacctggctctccctcctggttgctagaatcaaaggcttgtgtcaccactgtggggaaagccctcgtcacagtgcgtgaactggcctttgtcttctcaggtgaaccaggggaggtgcttgtaagtttggctcaaaaatgttttcatcagaaaaatgaatcttgttttgtccaatattctttttctgattctatcatctctctgtgaatactagtttaaaaaaaaaatcacttctgaatattttattttttttctattaacagcaaaggcatctgggtagtggaaagaatgacactcacttgactaatacttttgctagctggtgttttaaaggccatggagtgtctagctccagaccatcagcagcctgcttaatgccacacagtattgatttttaaccagttttcatatcgtagctgtcaaacttgtgaattcatataaggatcttttttcctaacggtgacttgaagatctttttctttaattctattgtaaaaactagtcaactgggcaggaagcctaaagatttttttggaggtttccatttaaacatctacattgtataaaatctgaactataatgaagcttgtagaacatactgatgccctacatattaatttttttcttcttttcaatgaccttagaaaagtaggaaaggctatgcagtcagcagaaaccaagtgctctaagtttctaaatttctagaggaattttaaaagttccattgttaagtatttttgctctgctactgtacccttgatgatgatgaaggaaccagagtctcctcttattcctggtacctacttctgattcaggtggtccattgtccaagacacctggcatgcactgtaattccaaatgatcaaaagagtattcttaagacaaatactgcagtattatataatcagaaaacagaaatagatttgaatagctcttataaccagttggaggaatgcctttccaaattaaaaaaaatattaaaaattgtaatagaatcgttgttttttgaaaggtaattggtttttaaatccactcttgctattaattagaacttatataacctaaactcttcacccacttctctataccattgttcctaacagcattactggtttcccttgatggctaatctccaaaacgacagaaggcaaaactttaaagtgagtctttggggagtttggattgtgtctattttgactaaaactttggtaaaatttataattgtataataaaaaaatactttccccacttaaaaaaacaacacagaagccctgtagctgataaactgaagtcagtcaatgatggcagagacataattcataattgaggtgttcacacagtgatgtcactgctgtgaggtcgctgtatttcatttgctgcccttcctgtttctcctttacattctccaataattgttctcatgagaatcaataacggcaactttgcctattactgcagatccatggatcaccttttgtatttagttttgacttaatatgaattgtttgtcagttgaaatgcttgtatcttcttaaaagttaggtaatgtacatatgacctttaatgaagtctagaaacacagaaaacataaacacattggggactgctacaaacctaaacaggagagccaagcaaaccatgtacttgcatattatcataaattcatccgtcctagcctgtttggttttcatgatactgtagaaagccatctcctttctgagttagtacagatgggtttttgccttttctaagaaatgtttagttgaccaacaattgaaaacaagccttgagcccactaatgcagatgtttgcattgctgttagagctcagtgtggctttggtttactttggagttaggaagtacaagggcttccttgagcaactagatggtgactttattgtaaacatccagtttggttgtaaggaacacattcaggtttaaaggcttcgtgggctaattgcaaactaattacactgtactgaataagagccttacaaggtgaattcagtgagtgcggaatagcagtctgtatttcactcatgttattagaaaattctacaccgtgaaagctcatagtaactgcacatatatttattttgttgtataaagaatttatgcttatctctgactagcctacaaataaatgagactcagactatggttattttgtttagcttttacaattcctggtgggtcacccctaatctgctcttctaactggctgctgccccagtggtgtcctccagacacttgctgtttctcctggcctgctcatggttcctctcccctaggtagcttcctcccagtctctagttatttctccatctcctctgatctctcctcctcccactaagttactccaaacccaccaacctctaattcctctagtagttggctgtagccaattttatttaaccaatagtatcaaatcaaggaacaaagtttgcacaacaaaagcttgtaaacatgactgtaagtaaacttgatgtagacactgtaggccttgaccttctggtatcgaacttagcattacaatgaataacaatagaccaaacctcaacagagctaaatgtaattttatgaataaaactatactgatatagttatttagaatatttttatccataacattctctacatatacaaacacatataaataatgcttaagtttgcattcctcaacatttcagatgaacttcctgtagagtctaaagctgccaattggatagatgttttggcatatgcctgtaatcctactacttgttagatagactggatcatcacgtattttaaaccagcctggtgtatttagcgagtctcttgctaggcagagtcacatagaaataccttataagggcagtggtggcgcacgcctttaatcccggcacttgggaggcagaggcaggcggatttctgagttcaaggccagcctggtctacaaagtgagttccaggacagccagggctacacagagaacccctgtctcaaaaacaaaaaacaaaaaacaaaacaaaaaaaaaaaaaaaaacaaaaaaacccaaaaaccttgtaaaagaaaaacaggggaaaatattaagtgaaatctttttcctgattaattatgaaacaaaaaacaaaacaaaacaaaaatccacaacgttctacttcatagaaaccagccaaattctgtaaaaggcattaccattctgtcttttctgccgtatttgactgttgctgataacaatactttgcgtctgtttttgtttttctcttttgttttggtttttattaaggtctagatgtagtgtgattttccttcctgggcttttctcccaaagcatttctatttcctcaaagaatgtcattctattcagcagatcgtgtgaaaatatttacttatggaaagataaagagtttctacctgtcataattttcctgtgttaaaactcccactaggcttgacatttctgtgttttgcgctggattgctgagaagtagttaccatgaccaggctggttgatgcatggtaatgatgaaaagcggggtgtttggaattcaatatggatggcagaaatgcaccctgtcagggaagccatatattaaagagaatttgaatgggaaaccgaatccccacctgccactgggaacattttgatcattttgatttattaaacttttataacaacattcagatggagctgaattaaaggctttagtctggaatagattattgtacatcattcgctatgtaaccggcatcacttttgaaggttctagcaatctgtggagagagatagaatgaatggatgagggcttgttttatattattatatttagcctgatgaatattgctttaagcttgtctatgattctcttattgataagcaggatttgcaatttcagaattttaggttactttgaatttttggtgttttttcaagcatatttgaaatagtgggaaataattttcttgttggagcagcacatatcttacacacaggcatattgggcatctgtttctgggtttggtggataaatattcacgtagaaacactaatggtgtgcgggagcctgtcataggaaggtgcattcccatatcactattgaaattctgtgcatcaatccttttgaaaatcgtctttcagcatcagcagccatgagcagtctgttctgaacagtagctccctgataaagagaaatcaattactattagagaggcactagaggttaaaggcattactggttcacacttggttttgcagccataagcggatacttagctgtgaatcagggatgatgcagaagatggatgagacagagttcaaggagcagtaatgtgagggtccaggactatcattccaacctgtctctgcgctcatgatggatggtttggtggcaagaagtaataataccaaatgatgaaagatacatctcaggaacttgagcccagcagactgtacctattggaattctgggtcataatgattcctgatttgcaaccaaacaggttggctgcatttaacagcacaggtttctgacagctgtgaaggaggcaagctgcatgtcaagcactcccgctcactgtaaatttaattacctcatatttttgcatagtagatgttgacaggaacttgtaagctatgctaatatggtaggtaatttgttacctgcagaaatcacttttccatgtgtcttatgatcattatcatgaaacatgataaatgatctagtccgtgaggtataaatgaaaatgaaatggataattggactctatgtctaaattgtggctggagtagtcacagcaattataattgaatttatctcataaaaatgcattgtgtaatctatcagtgacctttcatcttctgcctctggtgttacatgaacctggtcttgtggtgcttacagacacttgctcatagactgaaaaaaatctagtgtgtatttgcatcatgttcatgcaggagtccaagcttttaatgttgatgttcttatttttagagtgagaacagagtattttgctgtttcaggtgccttggtgagatgattttggaacagggacgaattcaacaaaattgtctggactaatccttttattatcaggagcacctaactttccactgagaggtgacagtgtgccctaatgccagacgtgtgtttactgtgattcttagaaaagtaaagaaaaaagaaacatatacatatcaaattaaaatagaattgatttttaacaccaccttgcctttattccatctctcctatttaatttcttttaaatagcaaatacttgctttaccgcaaacattaagccttcttggggctgggtatgtgacttattgcggaaactgctctgcctacaagcaagaggatctggtaccatgtaaaacctgaacattgctgcaggtcatctgcttgggaaacagagaaggggaccttcatggcttgctggcagccactgtagcccaagcttcagattcaacagaatgacgctgtattaaaaaataaggtgaaaggaaacatggaagtcagccattgtccactactagtttcagcatacgtacctgtgcacatacacaaacatacacttataagattctcccttcaaactcactattaatgtattcactgattagatttaaggcttttaaacagtgataacatatattagcatatatgtattttttctgttttattagcattgtgctcaataataaaacagataaaatacataaccagtagggccacccactgggcctatgtataagtaagtatggaccaattcatcttcaaaattgtcctgtgttatatatatatttttttcacactctgtcctatttgatcccttttcctccctccccaatccccaatctggcttttcttcataaacgttcaagtcatttgtaaacaacttgttttttcttcatttacctccatctaagagaagctggttagggttgaattattaaaccgtagtaggttaaatgttatctggaaatttgattttttttttcttgaagtaacctgtctatcagcagggcgtattcccaaggtatcctttttttgttttgattctttttctttttcaactgtctcctcctcctcctcctcctcctcctcctcttcctcctcctcttcctccattgtagtataggcagcatagttgctagtggttagtttatttcagtaatcaattgatgtaagtggagctaataaacaatgtattcttcactctcgtaatttaataaaacagaagtgttgaatgaaaggtccaataaacagaacttactaataattaatttacagtgtgccataagagatgtgtcctgagggctcccaatgaataagctagagaaagtacccaagtagctgaaggagtcttcaaccctataggaggaacagcaatatgaactaaccagtaccccccagagcttgtgtctgtagttgcatatgtagcagaggatagcctagtcagccatcaatgggatgagaggcccttgttcttgcgaagattatatgccccagtacaggggaatgccagggcaaggcagtgggagtgggtaggttggggagcaggagcagggtgggagagggtataggggacttttgggatagcatttgaaaagtaaatgaaaatatctaatatctaatacacacacacacacacacacatacacacacacacacaatatgtcctgtatgatgttttcctagttcaataacacaagttgaattttcttttttttttttttaaagatttatttatttattatatgtaagtacactgtagctgtcttcagacactccagaagagggcgccagatcttgttagggatggttgtgagccaccatgtggttgctgggaattgaactcaggaccttcagaagaacagtcgggtgctcttacccgctgagccatctcaccagccccttttttttttttttttttttttttaagttgaattttctttatccttaaggagcctggttctgataaatagacttgattcatatgccttaggacccaactccagactgtgacccaggtcttggtcagcagaattatcatgttatcttttttactttcatcataattacatacaattctacaagaattacctaaactcacctgtaggtattgagaaaacatttttatgcaagatttaataaacatgaataagccttctttcttatactcggcttccccctaaaatttcattattcaggtttttattttatcactttatgatctctatacttggttatttgagtactgtcctcagttttgtattgccctcccaggtaatgttaaaaccaaggtctacaatctttgtatcctttattctttataaaggaacaggaacatagtcatgtgttctctgaatcaagtagaaggcatttcagagaacacagcgactggtacaccggctccccagatccagacggaaactcaagcacctactcctcgacctatgcacacttgtatgcactcgtgtacacgtgtactcggtggacacttttgtgtactcacgcgccctgataaaaacttcacttggcctcgattctaggaagctgaagccttgcctgatggtaaggaaaaaatgaactcatcctctctctgaagtcatggtccttaatagataacaacattcatctgacttattcttaattttattaaaattaatttaatattaatattaaaacgctctctccttggttttgctcaacaaggtatggcaaaatctcagactgtattgtttgttatttccttttaaagataatctaatagacttcctctatcatttgttatttccctcggcagtcttgatgttacattctatgcactggtatacatttagacattacagatgttgatattatgaatctacctgttctataatgtgacacggtttctgtgtgacacaaatttggaagtccctgggggatgctttctttgagagcactggcactttggccctgtcctgggaagtcttagagtgaatagcgtaaagtgatttagactctgcagattaaaaacatctggcaacttcagcctgcacattcctggcacttaggccatgatatctttccccatgaattgtaaatgtgatatagttagtcttagagctgcaggaagcattccagatttcactggcagaaggggaggtgcctgaccccagtctctcttttcaccctttgtctacctaggctatacttgaggtaagatctaggtcactgaagcttgtagagctgccacaaccctggtttgctaactgtagaactaagtaggaacgtgaggcttccatcattctccagtgatgatgctattgaatgcctccgttttgctttcgatctgttgtttttaatcgtggagtaaacacaaaaactaccatactccctcccatgccagtacagttttataatttgaacctctcctagctgcaatcctgagagcaccatttcatggctgctgatgtctgtaccaccaacttgacaagttcagagaaaataaaaatgaagagaattatcactttattgtggttttcatttatattggaaaaacagaaataactttctagagagggctagaactttctagacccagttagtgtctttgaacaaactatcaagctttcttgtaatcctacatgactggtgtgtaagcttgctgtcctaattatatccagtgttagccttaccacttcaacacaaaatacagatgcagaattgtatgttttaaaaataaaaaaagacccgggactttagatgaggaaagggtgtccttcacttatagtatggaaatgtcatgacctttatcaaatatgaatatcattgtactaaaatgcaagaagaaagattccaaggaaacccactttagttccctcttcctcctttgtatacagtgtgcttcctttctcatcctatctacatagtaggcttccttactcatcccatataaatagtaggctttctccctcatcctatataaacagtacgcttccttccttagctctttcttcatcctatatttattaatggaagtattgtatatttctttggtgcccatgaaattattaagatagttttacttgttatgaaaagtatttttttttcatcagaaaatcttcagttgatggagataaacttttaacgtgatatggaacctggcatttaagaaaatatgactaatgtggattagtagttacttcaagctcatagtttaaattccatgatatctatcaaagcagacttggaattttgtcttatctggaaatggctgacacgaaggaatagcacacccttcagctttaaatctgcactctagaaagctttctttaactagaagtttgtttcctcttatggccatacaaagtccaattattaacgttatttcagttcttttaacatcagcatcccattatgttgccgacttccaggggtgttgggggaggttatgaaggaactgaaaataaaaggtctttggctgcctgacttgtcacattagtgtaaaatgtccttgatccaatagcttttcacatgactaaacatctttaaaatgtcaacaaaaaatgttgctttatccagtggtctataattattcctgtatacctactgattccttttaattatacaaccatgtctagtgcttttatttttggtagcatcttgacttttggaaatataggtctttttggctctgaagaagttcacagagtcatagaataggatgatggtcttagtttgttttccattgttaaaatgacctactggaggctaagtaagaaagaggttggtttaactcacagtttgggaagctgaacgacaagcatgtatgttctacagaatgcaaagaaactgtgtttattgtcgagatgacatactgagagtttcatatgcaaatgggaagagataacatgacctggtaggaaaatatgtgtttgtgtgtgtttgtgtgtgtgtttgtgtgtgtgtttgtgtgtatttctggtattaaatgtgaattaactcaagtggagatgccacttagaggacagtgtcctctgtgactaaagaactttccagtagatgccacctctaatatgtcccatagccttgctcacattgctataccaagtaccatacctctgacatatgaatccctaagagacacaccacatctacaccataacaatgactaaaacagttattatatcgtgatcacacagagctgtgattttgtgacactgttcaatgtcttcatgctcatatctacacactctccaggttaatattaaactctttttctcctacttggggaattttaatagaagtgcataggaatctttcatctcatctttgataatttttactgatacttaaggagctgttattaacaatagcttaccttgaattaatgaccctatcagctatatttttatctcactaaaaaaatcatctcccgtgttaaaccagaacagatttttctttttaaaaagtggaattcagggttcttgtcttgttattttattgtcataacacgttacatttgcttttattggtttattctttctggtgactttatattgaaagtttttgcaaaattatgttggacccagtaaaccaacaatacaatttattccactacttaatttttttttgtttttgtttttgggttttttttggttttgtttttttggttttttttttttttgtttgtttgttttggtttttcgagacagggtttctctgtgtatccttggctgtcctggaactcactttgtagactaggctggcctcgaactcagaaatccgcctgcctctgcctcccaagtgctgggattaaaggcgtgtgccaccatgtccggctgctacttaattttttaaatatgaaaatgctcttagattttgattgcttcagagttagcagtacttttgttaagtctattctcgtggggagacaatatgcatgtccctcttagtttaaggtcttgttcagttagcgtcaatcggtcatttgaattatttttcataaacacatctaagtctgtcatgtgttgattagaaggatatgattgttccctctttccctaggaagactctgtcttgtactctcctaaactgtgtgaaaatataagtctaattatgagagtcagttgggacaagtaagtccttgaattgaatatgcctttctggaacccactgtcatcagtatggcctacttccattgttaatctgagtgataacactgggggttgggcttgggagccatctgtgaaaggctcccttagcatgaaaacttcatgcatcatgtttaatcattttggagtgaacacaaatgatgtatttatcatgaacatatatttaacatgttttattacagtgattcaataccatagagtgcttagacacaggaacaaaatgacaaactgtgcttttttataaaagctttctttctttccttctttctttctttctttctttctttctttctttctttctttctttctctttctttctctctctctctttccttctttatcttctttctttctcttatgtctccatgtagaatattcaaaattcccacaataatattttctcttacacatatatctcatgtgcatataaaagtaaatgtatttatacatataacacagtagagaaattacaatgttattgtaaagactaaaatgaatttagtggatccagccattgtgttaataggtatcggcataagatgaatgccagcagtactcttttgtcttcatggggaatggagtgaagtcctgcactgtatgacccagggatactgagcaggctgcagggacatttattgcaattgctgcagttcacctcatcctccaccatatatctcattcttccctcataaaggtgactgatgagagtgtgatctggggacctctttatgtctctagacttacagagaactaagcgttggagttgatggcttttctacttttactactgagttgattgttattcttggaaccacctggatgttctttccttgaaatgctgtgaacagtgagctctgacaaagctaaaatgaggaattaaatgaacataggataactcttctgtatgtattccctcatgactcatttaaaagcatctataattttattataatgtttcgttgactgccgtgtgggttataatattgagaaaatatctagtaaaattgttaaattcctataatacttcaaacgttttagccagttcattgtgtgggtagtaaacataaatgcaagtaatacaaggtcaaaacggtgtacagaaacatatttgtatcacagtgtaataaacttcatatatcaaaaatttcctcatttctacctataccttatgcataaacctacccttgctttcagtttttactgacaggtctgaaggaccactctgctctatgcttttcatatcaaggagggaatgaagtgattgcagcaatgttttcaaaccatagggactaaaacaccatagtaatacattggatagacatttctgaatacaaaattggcaggttcgtcaccaaagtgattcttcctatttcagtacttcaggctgcaggaaacagccatgttgtggaggtgaaagatctgattcttccaagtatgaatacacatcacgctgtgaactgaggtggagaaatactacttaatattgagagtggaaatttcatctaataattttttcctaagctgaactgcattatatctcatattagtaaacattataccattacatctcacatatataataatataatatattgctatatttattgtatatacaaacactctctggtgttactataattatcttctcttgtatctgtcctgatttatagtatattaagaatcacatcattacatacattaagaattatatcacagggtatttttcaatggaaatgctattgaaaaaactttccaatgggtcagctttgacttaaaaacaaaaaaatgaattgttgttaggtatgtcctggcatttttagttatttatttattttttacaagcaagataaatcatgggttgccacttggtcgctaagcaattgcttagaaagtgttcttttgctctggtcaactaactcctttaattaaatagtaacattttgaaggtgctgtatatcaatgtcagagcaattggccagctatatggttcagagtaggaagcagtaaatcttactttctaaggacttaatttcagcctcagaaaatgagtgtaataaaatgggaatccccacaccttcatgtggagacctacactgaaggccaatgtgcatactcttcaaagaactggtaaagtgtgtacaataattgcttttcttgtggttacattgaaagtttcttcatcagcgcttggctagctggccatccacccataacaacagtttggagtttttaattcactgcaagaagtattagaagttcaaggaaggcaatgcgttgtagatcaatcactgttcttcattgcattacagaaatgaaagagaaagctaatcatgctggtttcattgaaccccatcactggtattgtctacttgaaaatttccatctcctgatacgggttaggttttcctcttgggtgaaaacagtttcatttaaaaatgaaaactaataacttactttctctctccattcctctctttgtttctctttctctctctgtgtatgcatgcgcacaagaaagcttttatgatagcccagccttgcctcaaactcactatttagatatagttaactttgaactccctatcctcttgactcaatgtcccaaattttggaatataatgcatatacttccatacctggatttatcttatactgggtctttattttttttttttttggtatttatttcatttacatttccaatgctatcccaaaagtcccccacacgctcccccacccactcccccacccacacactcccacttcttgggcctggcgttcccctatactgagtcatataaagtttgcacaaccaatgggcttctctttccactgatggccgattaagccatcttctgattcatatgcagctagagacacaagctctgggtgggtactggttagttcatattgttgttccacctatagggttgcagatccctttagctccttgggtactttctttagctcctccattgggggccctgtgatccatccaatagctgactgtgagcaaccacttctgtgtttgctaggccccacatagtctcacaagagacagctatatctgggttctttcagcaaaatcttgctagtgtatgcaatggtgtcagtgactatcttgggtacagttattgttgctgtgaagaagcgccatgattaaaagcatactgaggaagaatgggtttatttaacactttcttgtcacagttcttcaccaaaggaagccaggacaggatcgtggatcacaggaggctgtgaggggtgctgcgtactggcttgcttcccacggcttcctcagtctgctttttttatagaacccagaaccaacagaccagtaatggcaccatccacaatgggctgagcccactcattaagaaaatcctctatgtggaggtttcttctcaattgaggtatccccctcttcagttgactttagcttgtctcaagttgatataaaattaaccagaatagtagcttttttgtgctttcattcttcaatcttaatgcagtattgtcaaagaggcctaatatgctcaagagatatagaaaagatctaaatcacattataataaaattctagatgtgaatgaaattcttttgatttttttttttttttctgtctacctttccttactcgagtatgttcaaagattgctttccagaaagcctcatctgttcacgtgtctgggactgtgcatgtgaatacacacaaatgttcagttctctgtggggatttttttgtcagtagactagcctgtgtgaataagtggctacccttgcactattgaaattgtaagccactgctctcttcataagtagagacataaatgatggcattcaggtcagcacaagcatttccttttgcatgcatcattacaattataaatcatgttagtgtgcttcaggactctcagaagggtttgagcagctaatctgagtcttagggtagccatactctacccagatctccaaataaatatctacttttcatggagagcacagtagttgcaagtgttctctttgagagtcctatggtcagtggtataggggctctaggtttggcctacggaagcactatcattctggtcctttattgtctttgtgtatagagtggatgaattatttgagtgatgtagtttgagagtgtatatgtcacttgaggtgacaaagtttaaatgatattttaatataaaaattgcttaacttagaattgggaaaaaaacacccatggaaggagttacaaagacaaagtttggagctgagatgaaaggatggaccatgtagagactgccatatccagggatccaccccataatcagcatccaaatgctgacaccattgcatatactagcaagattttatcgaaaggacccagatgtagctgtctcttgtgagactatgccggggcctagcaagcacagaagtggatgctcacaatcagctaatggatggatcacagggctcccaatggaggagctagagaaaatacccaaggagctaaagggatctgcaaccctataggtggaacaacattatgaactaaccagtaccccggagctcttgactctagctgcatatgtatcaaaagatggcctagtcggccatcactggaaagagaggcccattggacacgcaaactttatatgccccagtacaggggaacgccagggccaaaaagggggagtgggtgggtaggggagtgggggtgggtgggtatgggggacttttttggctagcattggaaatgtaaatgagctaagtacctaataaaaaatggaaaaaaattgcttaacttaagattaagaattcacataatgtaaatataagttaatttgtaggaaaggaaatatataaactttgctgccaacattgctcctactagtaatactacaagacagtggacaaaagggtaaatagagaagtatttgattgcctattgattttattagcccagggaagtcaagtatcaaaaacagcagtaaatgaaacagcattgtgaattaactcatgactggggactggagagaaggctcaacagttaacagcacagctcttcttcaagaggacccagattcaattcccagctccctcctggcagttcaaagctgtctgtaactccagattcaggggatcccagtcccttcccccatacacacatgcagacaaagtaccaatgaacataaaataaaaataaataaatcattaaaaataagaaataacatgagacaccgttacatattttgtcaacacacctagccaaatgagcctccagtttttccagtgcagtgcttactttattcttcattctctctacatccaatgaatcttattctattgtcacatacatgatattaagtgcccacagaaaattattgtaattaggaatgacccacctcccattggttagggtttgcaaaggttctctgttttatcagtgcgacactattgtgttggtatcccattgaaatacaattgcaaattatttaggtctattgtaaggaactcaaaaatgagctcataaatgtgggacataggggccttttttttttctcagtttctctgtgccatgtccctccagtaggctacaaaaaggtaccttgaagaaacagagcctagtgaatctgtcattaaacaaaaatcagaacttgactaacagtccagaaaggaagtaaatcaaattgaaaaaaattctccatataaaatatttggcgctgattctagtagtcctttagaagcatcttctctgacttcattttatttgcaagcaattaaatagttaaaatatgttggtgtagcttaaataaccacttttgtaatttccaccactcccaacatagctataaatttttctctcaggtgaagtaatgtccattcgcaaccttcttagccactagcaagtagcagagacgaacaatgtcccaggagagagaagccactttacaagtttatagccaactcagaagtgtttcctagactcagtatcttctaaaggcatgggacttgccagtggtaaagcagtttttgtatatgttattatattaaagaattgaaatgatcacagaatctggcagtgggagaggttacatagcactgagtcaaaatgcataaggaatacatcacaacctagcagggattgcaggaatgtggccggagagccatatgcagaacagagaaacaacgaagtggggcttcgtgcctgattctctcctctctgttcatactaatttcagttttccggtttcaagcactgttagaggatgtgttttattaagtacattggggttgtggtagtttttcacagcagtcagaagacaccaacatatcacagcaccaaattctatagtgggactgctaacttagggcttgttccaataatatctccctgacaaagagagaaagcaatggggaaacagctaggattgaaaggaacttaattcatcttgtttaaaagatggatataggagtgtcgtttgctgtgacatttactctgttgctgacattttctggctttctggcttctgtttctgagtttgcattgtattgattgactgaattttgataactggcatatatttttaaagaactattataatgggaataattgagtgagagaacatcctttcatagtgctttgcttgatttcaagacatttaaacaaatttttcaaaaaaattgaacaagtaaagcaggctgaatatataattgggattcgctcatcatatttggatccagaataacgaatggaagtcattactgggaagttaattgggaatgttggcaaagtttaccctgtattttgagggttgcatgcttcacttgatacctagtgcacacttgggatttatctgcaccacacctctgggtctagtagcatattaagttatgaagaatattagcattgctccaaaacaattacttgttcatttgctaactgattaaaattcatgaataatttattgaaatgaatagagattttataaataaatctccttgttctctggggggcctaaaaacaaaatacatatgctaatataagatctctttttacggccaacatccaaactttaatattgagtggtatattagtctccttaatgtgaaattcactaataaccatgctgttaagcaatgtgtctgctccttagttgctttgcattctttggcagttccaaccttgagctattgctctgcttattgagagctccagtttcgcctgaccagaggaagtgaaacaaaactgatcgggacattgctgccgttctccaggccagcatgtgcaatgtttcagcctcattctttcatttctatgtgtctttacttatgcatgtcattgcattcaatatttaacatcagattaatttttgtcgttcaggcaaacatacaaacaaatcaggacagagcaaagaccctcatacatggaacctgctggtctattttagaaatgtaatcttttagtgactcctgtggtagcttgcttgtgaaaagtctgtgcaaagttaaaagcgcatttgcatttcccctaccattactgggatggcttttgtcttttgaaagttggcctcctggctccagatttcactttctatatcactgaatcaaacaggagtgataaagggctgtgtttggcctgaaaaactggttcatgctggcgttttacccattgtccacgcccttcctcctttttccatgtactctgttgcaaatggcggcaattagcatacatacacataaggtcagtttttacagtatctgtacatatagttcaaagaatgtttacaatttataattcacttaccatatttttgttttgttttgtcttttctcttcatttgtcatgctgggtatcagatctcttcgtgtcattggtgaggcttaaaatgtgtgaggcccgttgctttggggtaaagccccagtgagctgtgaatttagtgttgtttcctactgtaactgaaattagtcattggatgagtcatctggaaggaaaacaagcactgcacatatggaagcagtacccattatccagaaaatatgatgctcggagacacttgcatgttctaggatgttcttttagatccacgccagcttagcatgcagagaatccatgccctttccatttgtttcgtaagctcttgagttggaaattgcaattccttggtatgaaaagtcttcttctggcctactttatctgaggggtgaatactctacaatgtttggttgattcaagtgtttcctttgaagacgagcttcatcgaattcacttgtgaaacaggcaatcatttagctaggacagaacttccctcattagtggtaaatacttttccaaactattcaaagaggtttctatgggtaaaggttttagagcaggtattaggacctactttctgtagacatagcactagatgtctacagtatgtatatcacatggtaattaggctggttttttacacatgagcatgataaatcacaactcactttattctttggcagccagtcatgaaagccttccttaatgggcccattcaagaagagaccacttatattcatatttatttgcaatagggaaatgttcatcatctctatttataacttttgtaaactatttctttatatatatatataatttctcctataaaaaattaaaaatgagtataaatatgtctcctctacattatatatgtgtccaacatgcagaaccttgtcagtagtagttagtaaacatgtcctgtgattttagtcttacaaactttgaagttgtatttaaaaaaaaaaattgagtctgtttagagatcccagttagatagccctgtctctactttgtggactttgtgggtatttgttattgggaagatttttaagctagtaacattttaaaaatcataaataaaattcagggttaggccatatctgaaaattagtttaaacttgcccaagtgatgaaaccctctttatggagttttctttgtcttccttttttcatgtaacatattaccgctagtaattcaaaagatactgtctgtgcagtcttgacttgcctccttttcagtccaggccaatatggaagcctgtgaggttatgttaatagttttcctgtctgtgatttcctgtaacttttcagcattaattcttaaatcaatttgggggcaattatcaccttattaagattaatactttcttttaatccctttcaagaccctgagaagtgtaatgattagtccagaagttgaaggggaaatatcacccgatgacagtctactaatgagacccttatgccttgtattccagtgggcaggctttgcacacagagccctgtgtggagtcctctagagaccgctcagtctttcactggtattgctgttaagggaaaacctgccctaatacatcattcatcattccataagttcacatgttgaaataatattttccaagttttctgtcaagcaaaatatcaaaatatcttaactcgaaattaaattgcagtgttcctttgacatttgagcttattgcctattgcatgctagtctgggggccattgatatccactgattgggtatttcttctgggtgtaaatttcaatttcctattctgtgtagtggcacatggccccagctttccttctagctttgtggcacctcctcattagttcatctgctggaactttgaagttgcaagaagcaaagcaagaaagagcagaggcaaaaacaaataaggagaagaaactctcagagctcacctccttctgtgtttgatgagacctgctcctctccagtgcactttctttatccctgtttcctgcggtgcatctgcaactttctctcctggaagtgcatgtttttaagaagagaaaacttttgctaaattgaccaaaagccttcataaaaccaatggctctttaaattacagttgcttcatcattactttccagtttatattttctccccactgctccttcccctcccctcccctcccctcatttcccttcctttctttccttccttttctttttttctgtcttttgttttgggccagtctcaccatttagcccagcctggtttagaactcaccttgctgacatcacgtttgcagcaaccttccatccaacctttgcaccctgtgtgttgagactgaaagcatatgccatccaatcctgcctctgattatctattaaacatttaccatgctctcctaaattgttcagtaaactttggttacatatgaagattgtatataacatatttccttatagtatatatttactatttactgtatatgtctatttcacgactcttaactaattagagtgtacattttttcttttctagaaccacctagacccattgctcctccccagctgcttggtgttgggcctacttacttgctgatccaactaaatgccaactctattattggcgatggccccatcatcctgaaagaagtagagtatcgaatgacatcaggatcttggacagaaacccatgcagtcaacgcaccaacatataagttgtggcatttagacccagatacagaatacgagatccgcgtcctgcttaccagacctggcgaagggggaactgggctgccaggaccaccactgatcactagaacgaagtgtgcaggtaaggctggataccagactgtcaaggaattttatactagtaatcaatacacacacacacacacacagacacacacacacacacacacacacacacacacacacacacacacacacacacatggtattcaacatttcgaccatttggtgtatgatttaggcatataatttttaaaaatttttattgaatttgttatttgacaactttatacatgtgcaatgtgaattctgattgttgttctctgccatcccccagacacaaacttctaagagttttactgtctttgtttattcataaccttgtttatatcataatatggcaatttaagagcagtatgagagcgttttgaaactcttctactctttgatgtaactgtagtctttcttgcacagtaattttgacgagttttctggttttgcgcataatatctcttgaagctatatatctctgttatctgtaaagtattttccttcatgttaaacctttttaccacatggaaataattttatctgcagtagagagttcatataatatagataagaaaattgattctaggattagagagaaagctcttttttgtacagtgcctggcccacaatcatgaaaccagctgagatcccagcacccacagaaaagcggactgtgttcatgcagatctcttactcctcccttgggatgcaaagacaggccaatccccagagctcactggctctaggcagtctgtgagttcatggtttggggagccactgctttaaagaattgagtggaaacaccagagaggaatacactgtcagcttccagccttcacatgcatacacacagtgaaaaatggaaataagcaaaaaaacgcctgcacacaataatagccatcctgtgcaagaaaccctgctgaggattagctcagcagcttgacacctcctagagaaggcagaaagtttctttcctgtcattggtctgtctgtgcttggaaatgggtgctaaaaatatcaatacagttacaggtacataagaaaattacaacgtaatatggtctttgctctaccatattggagaaattaccagttatgcaaagataaaacatttaatcacctattttttgagcacatatctactttaatattaattctcaaagtgacaagttttagttcaaagggacatttttgtgtccatgaagcagtaggtgaaaatcccatacgtggcctaaaaaacctagcatttggagaaagcttgttgactttgtaacattggctacatttgtgcagaaggaaaaaaacatgtttagggaaaggagatatgctctttgtcctacaaccataacattgcaaaaataaccacttttttcttttttttttaaataaactttatttaggtcagaaaaaaaatacatgcacacacacacacaacctgaatacttcttaaatatctgatattatttataattttattgggctagtcaccaaaaattctgatgtaggacatagtagttgatacatatttgatacatatttttattgcagtcaagtttatataaatggttaatagctgtgttgtatattttaaacttatgcgacatttaactgttgattcactggttcggcagctggcaagtagagggtcccctaatgtgttgattggcatctgacagttgagagcttggagagccttttccgaatgctcagcttaacttctcagtttgggtttacgtgctctgtgtatctgtgagctcttctccagggtttcactaaagcacctttctgcagggaaggggagctgaacgctctatctagtcagagacatcatcgtagcagggaaaaggcgaaggacctgaaagtctgtactccaaaattcatatcccatgcgccactcagaacaattgtgagtcggtttacaaaagaaaatactacatagtgtctcacaggaactactcctttaatatgtaatcttttaaaattacaaccgttgatcacaataagctactcccgtagtttccctcttgacttcgtctacactttcttttacattccttcttacgttgttactgttttcattcttgtcagataggctgcttagaatgaacagcagcatgaggaattttatgtagctgcttagcctcaaagatgcttgtgactcattcttgctgagtgagttttgaagattacaattaaatgattttagggccatcattaagtgctgtattaagtgggtgaaaacaccatgttaatgaatgttgatttttgtttcctattgatgtttgtgttcagagtgtattgaactaacagaagagaaactatgactggaggtcactgtaagaactgccccatttggggaagaaaggagagtaagaatatctactagtcagagccacttctgacttagaaaaatcttgatcattaggaattatatgggcctttaaagttgattccttattagagtaacatttaatttgtgtactcatcatgaatttaaatgatatcatgtccgataagttgtccttttacttccaaatatagatatttcagatcatcattcacccttgataaacctttaccaatgtttattatacttagtatcttctcaaagttattctgacctagaattttagggaaaaagcagtctagactagatatttgtctctatgtgtttatcagatttgagagaagagaaggctaactgatcatagccaatattaaggtcagtattaagttcttgtatttgagaaggagcagctcatgtagtaatttctaagcattctctgtatagaaaaattagaatataatttagaaaaatcataaatccaagaataaaatcaatattagtttaaatcatgatgcattttacatacacccacatcaaaatccgtttccttttctctaagttggagcatctcagagtattacaaataaactgagcttaaactctacctgccatgaataatgggactggcgtagaattgaattttaaatctacaaaacttcctttttaaacaggaaagacagtatattgaatttttattattttcaaatagatatttctatatactatgtgttaaatatgttgttacccaaaactttaaaagtatcatttcttcctaatgcattactccccacctccacccactctctttttctcttgctctccattctttatgtctctctgtgtatatatgatatctcattcacaaaattattttgtaatttcaaagaataatatcattttctgccacttagattttctcatttatttgctatattatacatcgtatataaccattaaattaattactatgtgctgtttctcaagctccttgttaatgcattcttaaacgtttgatattttatgtcagaaagtagtaaaaatcatttggaagacagctcccagtaaataattttacagccagggaaaggttttggacatatattgtttatagctttacatttttaaggaaaatgtatgtctgcatctaaatactggtgaatactactttagagtcaacacataaaattaggcagcatgtgatattctcaccagtcctagtcattgaagatgaataaacacaaattctggctgctaaaacctggaatgggaacatggctaagttattccctgaaacagtacagcttaatggtcccagcttccctagtactggaagcaaagaagatttttgctgaacactcactcaacttacagcaacaacaaaaatggaggaaatgtaataatttaccgttttctgaaaatgccctgcctagttagttaacctttctgttttttgtttattttttaaaccttcggaggcattcaaacaatttgggagatgcagtcttcagcttcagggtctctcaagttggagaggtggtcattatggatggtacggctgaaaccacctatgcccggttcatgattctccatgaacctgaggcaagtgtttatttcacttagtctgcagcctgacgcatgtcactgctcatataatgtttcttcaggcattttatacattttaaaggtgccgtaaatttgcagttgccttcagtgagcagtaattcagacactctattgagcaatctgagaacgtatgcttggtttttgtggtcgttcagttttccgctgggtatagcatctagtctataagcagagcaaacatacactttctccttcttattaaatgggaagaaaatgtgccatcctcgggaacgatctacccttgcatgctttcccagttgcacattgaacttgtttctctaaattgcctgccttcgtcttctggatcagccatctgggaatggcttaatgattaactgacctttttgccgtatctctttcataggccaggtcacctggtcagagtgcccacaatataatatatttacacatttggggatactacgctgtactcttatattgaagttcagtactcttggcagttttcaacagacaagtaaatctacgaaacagtggggggnnnnnnnnnnnnnnnnnnnnnnnnnnnnnnnnnnnnnnnnnnnnnnnnnnnnnnnnnnnnnnnnnnnnnnnnnnnnnnnnnnnnnnnnnnnnnnnnnnnnnnnnnnnnnnnnnnnnnnnnnnnnnnnnnnnnnnnnnnnnnnnnnnnnnnnnnnnnnnnnnnnnnnnnnnnnnnnnnnnnnnnnnnnnnnnnnnnnnnnnnnnnnnnnnnnnnnnnnnnnnnnnnnnnnnnnnnnnnnnnnnnnnnnnnnnnnnnnnnnnnnnnnnnnnnnnnnnnnnnnnnnnnnnnnnnnnnnnnnnnnnnnnnnnnnnnnnnnnnnnnnnnnnnnnnnnnnnnnnnnnnnnnnnnnnnnnnnnnnnnnnnnnnnnnnnnnnnnnnnnnnnnnnnnnnnnnnnnnnnnnnnnnnnnnnnnnnnnnnnnnnnnnnnnnnnnnnnnnnnnnnnnnnnnnnnnnnnnnnnnnnnnnnnnnnnnnnnnnnnnnnnnnnnnnnnnnnnnnnnnnnnnnnnnnnnnnnnnnnnnnnnnnnnnnnnnnnnnnnnnnnnnnnnnnnnnnnnnnnnnnnnnnnnnnnnnnnnnnnnnnnnnnnnnnnnnnnnnnnnnnnnnnnnnnnnnnnnnnnnnnnnnnnnnnnnnnnnnnnnnnnnnnnnnnnnnnnnnnnnnnnnnnnnnnnnnnnnnnnnnnnnnnnnnnnnnnnnnnnnnnnnnnnnnnnnnnnnnnnnnnnnnnnnnnnnnnnnnnnnnnnnnnnnnnnnnnnnnnnnnnnnnnnnnnnnnnnnnnnnnnnnnnnnnnnnnnnnnnnnnnnnnnnnnnnnnnnnnnnnnnnnnnnnnnnnnnnnnnnnnnnnnnnnnnnnnnnnnnnnnnnnnnnnnnnnnnnnnnnnnnnnnnnnnnnnnnnnnnnnnnnnnnnnnnnnnnnnnnnnnnnnnnnnnnnnnnnnnnnnnnnnnnnnnnnnnnnnnnnnnnnnnnnnnnnnnnnnnnnnnnnnnnnnnnnnnnnnnnnnnnnnnnnnnnnnnnnnnnnnnnnnnnnnnnnnnnnnnnnnnnnnnnnnnnnnnnnnnnnnnnnnnnnnnnnnnnnnnnnnnnnnnnnnnnnnnnnnnnnnnnnnnnnnnnnnnnnnnnnnnnnnnnnnnnnnnnnnnnnnnnnnnnnnnnnnnnnnnnnnnnnnnnnnnnnnnnnnnnnnnnnnnnnnnnnnnnnnnnnnnnnnnnnnnnnnnnnnnnnnnnnnnnnnnnnnnnnnnnnnnnnnnnnnnnnnnnnnnnnnnnnnnnnnnnnnnnnnnnnnnnnnnnnnnnnnnnnnnnnnnnnnnnnnnnnnnnnnnnnnnnnnnnnnnnnnnnnnnnnnnnnnnnnnnnnnnnnnnnnnnnnnnnnnnnnnnnnnnnnnnnnnnnnnnnnnnnnnnnnnnnnnnnnnnnnnnnnnnnnnnnnnnnnnnnnnnnnnnnnnnnnnnnnnnnnnnnnnnnnnnnnnnnnnnnnnnnnnnnnnnnnnnnnnnnnnnnnnnnnnnnnnnnnnnnnnnnnnnnnnnnnnnnnnnnnnnnnnnnnnnnnnnnnnnnnnnnnnnnnnnnnnnnnnnnnnnnnnnnnnnnnnnnnnnnnnnnnnnnnnnnnnnnnnnnnnnnnnnnnnnnnnnnnnnnnnnnnnnnnnnnnnnnnnnnnnnnnnnnnnnnnnnnnnnnnnnnntctttttttctttcttttctttttatttttcttttttgcttttaaagcaaatagaaatatttgtttttcacagccaaaaatgacacattagtggtgtcttaaatgataattacacagacttgtatgacaaacaaaatggcctatgtacaattaaaaatatgtagaacccacatgaaaaatttttaaaaaagtgttaattatgggagcaagttcacgggaggtggctgggagattcaagcctctgatgtatcacaattgtccagatttgttcctgaaaattttgattttacttctgccttcaattatcattatgttttccattccttattgtattataacatgtgtcctttgatttaaaataacaaaaacaaatcatactcaggtaaaaaaaaattcaatcatttataccccattcattctcagatgtattctctctttctctgagcgtgcaagagtggcaaagagatgatccaatttggtatttttaagtccatttatccatatctttttaatttgatgggttttggtcactcagtttgtttcatgacaaaaatcattttcatcattttatatgagtcaattcaaatcaaaacatgatgataaatctaatctaccatcgacgtaaggagttatttcttgtctctgctgtcttgttctgatatacagaatcactgtttctagtggttctgtctttgttttttatcctatgtatttgaaaccacagggaaaaggcacataaagaaataagagataataataaatgaatattattctagagatttcaaagctacacaatattttgtgaacccaatagaaaatgaacttcaaaaagtaggaactcatgcttttcttgtagcctcaagcaaaatctgtgcaaattcatctgtcactacatatgacatggcctaaaaatcactgggcgatgtccaatttaattgtctcagccgaatcttctcaatgagactgattttaaagaataacttcacttcagtttactgctcaatatcgttatttttatattgctgttaatttcctctttaagtcatataataagaaatcagagaacacattacttttatctgctacttaccatgatctatttactaggtcctttgtagatatatctccaacattaaaaatatgattttataatgctttgtactatcatatgcaaacctatattttattggagatacacacacacacacacacacacacacacacatacacacacacacacacgtggattagaaaacatttttaaagctatgttgccagggaatgcatggtgactctctgttccaaagacattctcctgtgcttcattttcttctcctgctgctagctaattctgcactgtgtgtatctgcatgcctctgacgtccactccgtcagccccattcagcttatttggagtcgtaacagtgtgcctccaactctgtatctttcggggttgcttaatgaaaaatcccacattatgttgattacataaagttcatacagcaaaattatcttatgaaatatcttatgaaatatacatatagaacagtaagatctgggagggagatatgtcagttggcaaagtacttggagcacttgagttcagtttaccaaatccatgtttgggttataatttattatcatttttaaaatttatttatttatttttgtgagtgtgtgtgcttcccttgtgtgcaggtataggctaaaggataacttcttgggcaggtcttggcatcatttatcgctcttgctatggaactttgccatcatgcttggcacttataagtacccacttaggactctttccaagctgaatacattttacaaaccgttcttagtacttcacatttacatgaatgttgttccactattgtttgtattcatttttctatggctatgatgagggagtttctttaaatgtataaaatacatttaattttttcttctgattattttccctgtcatcccactttctgtctttctgctggccagttcatcatctctcatctctatttaaaattctactccatacatgtgttgagatttatttagcctttcttctagcactgacaatttggactaacttgctactatgaattttaaaataaaaactgtgtgctgatcttcccatgtcttaaatgttgttgacacatggtgtacaattatctatttccccaaatattttaatgaagcttctatggataagcctgtgcattctctcattcagttatagtaaacgtgctttataatactttatctccagcttccctatgaactattctggttcacttgggctcgttagtcccttcatttgatgattattacaaagctactagattagcaaggaagaatgtcattcaccttgtgttatctttgtgtatctcctgtatgtgtggcagacagtacctaaacagccttcttttctaagatgatgtttcttcattggaggcccttagattagatggaatcataacctagaacacggatcaagtaccgtcaatgtgctgaacagaaatattaagctcttcagtatagatcagggtttccctaagtgctggactgtgatgagtttttcagattttaaacaatagtttcccttgcttagaaaatggctttgcaggtgagtaattaggccacaagcttgcatggatgagttctctagctgtgaatgatgcatctctgaaagatgagcagagatttatgaagaaaatgatcaagagagttctggatgtaatttaaggtgtggttttcagtaaactctatgtttaaatctggctctactgcctcctgagggataacccactcaatgtcagtaaggcctatcgtgtaaggatgagtaattgaagttgctccatctagcatttgtgagccaatcagcgagtgttgtgttaagcttaagtgttgcttctacagttctcaggcactgtgtccctggttgtgaaatgactcttaaaacgaagtagatatgcattctaagtgtaccaattattctcttaaagagatttgtaccaaagccaccttcggtttccatgcagtgactgatgacagcattgacatctgttcttccttcctgttgctacgtgatactttactcttaccttttgaaataaatactctaatagtagcagcaggattccagaatggaacaatggccagcacatctttttttttttttttttttttttcatcaccaccatggagaagaaaaaagagcatgtttaaagctgttatgtgttttctgcacaccttcttaatgcagtgttgaagacatgtgcaccaagaaaaacttactatctgagaagcgatgccattgaagacattttcccttacactatgaagagcctaagccctaggagaatctaaaagcactatgcaaccaacagacctctctctctgctgttgctctatccatcttgtttgggtttgataccctgcatttatctttgcattcatttattagtagactaattacttatttaagggtcagattttttaattattttattggatattttctttatttacatttcaaatgttaaaccatttcctggtccccacttccccctggaaacccctatcccatcccctctcccctgcaaatattacggtattccaccacccattcactcctgcctccacaccctcaaattctcctatactgaggtatcgagccttcacaggaccaagggcctctcctcacaatgatgcctaacaaggctatcctctgctacataggcagctagagccatgcatactccttgattggtggtttagtccttgggagcttggggggcggggggttgtctggttggttgatattgctgttcttcctaaggacttgcaaaccccttcagctccttcagtcttttttctaactccaacattgggcacactgtgccattgactggatgcaagcatctccctctgtatttgtcaagctttcaggagacggctatatcaggctcctgtcagcatccacttcttggcatccataatagtgtctggatttgttaactttatatagtagaatggatacccaggtagggcagtctctgaatggcctttccttcagtctctgcttcacactttgtctctctgtttgttactatgaatactctgttcctccttctaagaaggaccaaagcacccacactttgatcttccttattcttgagcttcatgtagtctgtgagtttctatcttaggtattccaagtttatgggctaatatccacttatcagttagtgcataccatgtgcgttcttttgtaattgggctacctcactcaggatgatattttctagttccatccatttgcctaagaatttcatgaagtcattgtttttaatagctgagtagtactccattgtataaatgtaccacattttctgtatccatttctctgttgaagaacatctgggttctttccagcttctggctgttatatacaaggctgctgtgaacatagtggagcatgtatccttgttatatgttgcagaatcttttgggtatatgcccagtagtgatatacctgggccctcaggtaatactatgtctaattttctgagtctccagactgattgccagagtggtagtaccaacttgcaatcccaccaatggaggagtgttcctcttcctcctctccagcatttgttgtcacctgagttttccatcttagccattctgagaatcaattgcctcaattttttatgacttgttttctagaaacaattctctggttgcactttagagtgagagattccctggagctccaaaggctgctacttcagtctaagcaaaacttgatcagtacttgagctgaagcagtggagataagaatcccaatgagaagatggtgctggaagagatttgatagctgcaatcagtggaatttgttgacacactggaagtgaattctggcttggaaaattaaggtgtagtgacaggatttcaccatagtagaacctttgggaaaatattataaagaaaacattatctgcttttgagaaatgagatagtaggttggcaattatattcctggagctatggctcaacaaacagggcagagagtgggacatacagacttgcgtgttattaatattttattccctctgggcatgttattgtgtactataatttagttgaattagacatcgaattgtcctttaactctactttttactaatatcttatttcatgggtattatggatagcaactattaatggttcatataaaatgagtataatatgttatagattaggttatatttaaaaattaaacttgttcaaggtattcttataagacccagcagtttagtgagctatcataggtgcatcttgagtgctctctcatgagaagtcagagcgtgatagcagcaacagtgtgcacttctgctatagtgggctttcccagccaatcatagggtgacttgcaattagctggtcttcagcaactatattccttattacattgctctctcacttcctattgtctcttatgttaagattattgatgcccttttgccaagcttgcagtattgaggaatctccttgggacatcacaagaatatgtaagcggtaacttataggcacctacccatgctccttctcatttggggggatgttcaatacaacagatagtgtgttacacagtgcatgatgcctaagtggtaataatcctccttccccaattccaacagtgagcactttgattatgtctatacagtctgactctgtaaaacttcaaatcagaagcctctttagaacaaaagtaaatatttagacttgctagggatttggacaagagcagcgtaaataagtatatatctctactcaggggaaagcaaggatgtttatatctccctgacttcactggaatgttcttataaactatgaaaagtaggtcagccacactgagttattttgttctacaatcagcagaacaaatctcttaaggaaataactcctcagctgcttgttattaagcaaagatggggtgcatgtcagtgactcattccttaaacaggccttgcttataatgtgagatgtacagggttaagagcagtttgttgccatgattaaagatgattcatttacaacgttttcattattttggaaattactgatgagccccctttaaagatgtggtcagtcatttcataatttaattgcctacagttctagggtagattcccaaaattgtaggtcagccagcttcctgtttctttaacagattcctgatattttcagcataagagggaaaatttgctttgctttatggtttcagaggattcagtgtgtgattggctggccttgatattatagtcaatagtgtgtggcacagctgacctcttccagtgcccaaaaaaggggggttgtagctcccacaaaatcacctttgaaggtatacatacccccagctacttaagtcacttaagttgtgttctatcccagaaaaaactgccaggctttctaagataaaggtttttatttgcaatcacacacccacccactccccattataccatttccccagagtaccactttggaaaccaagcctttgtcagtgtgttgttttgggaatactcctgtgctgacctctagcaatcacttcaagttgcttgatcagtgagttaattttcacttaagaacacatgttagcattagcactttggtgaaactggttaggtgcgaaacaaatctggaagtctgccaagcacttggagacaaatttgacaggagcctgtatatgtgaacttgtaacagtgaagctacaatagggcagtgtttcatctcactagtaagactaaaaagtgttctgatggtcaaggtgagggcacactcctttaatctcatcacttgggtagacagagacaggtgaatctctgtgaggttaagaacagcctataagtgaaaaccctgtcttgaaaaatgaaacaacaacaacaacaaaagaattgttctgctcttcagagtaagaagtactctttgtttttaaatatctaaggggatttgattatagtcctgcaatgtagaatgcatcaaagtatctgaaaaacagaagttaatgttgtttacctgcctgcagtagaatgagaaagccaagtgatcctatgtgcattacattttaattttaattggaccaataacacattcattatattgtaatctagaccaagtgataatgcatatgtcttcacataaaaatgtattttcatcttggacaggtggcatataaatatttgggagagagaaatggtttctcagtctaacaaggcacatcacaagtacctgccttgagattccagaaagaaagcaagttagatgtttttcattaattcccactgctaaggtgctggcactttccccgaaagaacctcatattgtggccatagtcatgcactgtcatatttttgaactaatatggaagtgcaactcaattttttgacagacactgcctcacttctggctgggcaatttttttcactaggacttcactgatgtgtaagtaggttgtgttacgcagcctaaaacggctctagatcaactcgattgagccaagaaaagtatcagttgagattttccctttttcctctattttctctttcttctggaccccacattctgttagtttctgagttcagatctctccttcttccttgtttaggaactgctcctgtatgaacaaatagcaagactactgttatcattgagagttaaatcagaaatacatctaaagaattttgataaatatgacatataaacttcataagtgtatatagtaatttctattttatgttttttatattcatgaatatgaaaatttagtctcgttaaaattaatctatttctgtgactcaactgcttagatacttgtccactgttttttattgtaattatttcctcaatttttcaaaatataaacagttgtgaacatgcttcaatgtattttttaaaaagtacccatggtatttaaatgtcactataattgtgatgccatatgctatagtcattttattttttatcagtgttgtttttcaactccaattccagagttttagacttattaatggtctagtattctagattggagttttgaatatcataacatcaatttctaagacatagcctatgttagtctgattttaacactgaaaatcgagtgtgcaattggtttttattcattctgatttacttgtttatcaagtattccaaactcagccatgtcatttcccagtactgtgttttcctcccagtgacctgtagcaggactgtccatctctctgctcctttagagttctttctttgatgtttcagacacatgttgggattcctctgaggatacttcagtgtctgggattattcttaacatgtggaaccatttagatgtttacatgttccttcagtcactttactatttccatgatccatgcccatcttctctactgtgttgcccatgttttcattctgtggccttccctcgacccttgatggatggtctgtcaaattctcctttatcctttcccatacccacccaatcttccatttaatcacattttaaaggacagtagtcattctaggattattagaaaatcagttcatagccaggcagtggtggcacacgcctttaatcccagcatttaggaggtagaggcagggcggatttctgagttcgaggccagcctggtctacagagtgagctccaggacagccagggctacacagagaaaccctgtctcgggaaaaaaaaaaaaaaaaaagaaaatcagttcattacagctaaaggttaaaaagtagaaattaacttaaacttatttctctactccacaaagctttaaggatgaagatactgacccaggattaatggcagaggtatattgtttaatacttttccatgtgttataggttgtagagatttgagatctaaacagaataaaccttgatttacctggacagccaattgaatagtaattccatttttaaagtcttgtgtaaaatataaagatatacacaatccaaaataacacgggcaataacagagaaaggagggagggggagagggagagagaggaagagggagagggagatggagagaattaggatacatggaaactaaatttagagaaccttgcttctttcaagtttatatttctatcagagagctgagtttatcatttatgcttccttccaaatacctttattcatgtatgatctatgcacatggggttgatcatgttgatagtcatttctgtagtgtttactacaataaagagagtaaggagaggtggccatgtgaagtccttctgaggatcatatgaaacaatgtgtgtgtgtgtgtgtgtttgtgtgtgtgtgtgtgtgtgtgtgtgtgtgtaggggaggatttgtatgtcaagcagtgctgatggaaggactttcaagtttacctctaaaatgagttactttcttaaagtttattaattttccttaggcacttagaggactgaaatgtaaaaaatactgtttctactaagttgcatcaccagatatattcattctttcatggtaattgcccacaagatatatatattgtnnnnnnnnnnnnnnnnnnnnnnnnnnnnnnnnnnnnnnnnnnnnnnnnnnnnnnnnnnnnnnnnnnnnnnnnnnnnnnnnnnnnnnnnnnnnnnnnnnnnnnnnnnnnnnnnnnnnnnnnnnnnnnnnnnnnnnnnnnnnnnnnnnnnnnnnnnnnnnnnnnnnnnnnnnnnnnnnnnnnnnnnnnnnnnnnnnnnntgcccacaagatatatatattgtcagtaacaccaatgatttcttctaaggaacacagtaaacagctttttttccctttgtacttcaaattgtagatgctgtagaaatcttagaatactattaacataatttggtaactactttgaaactatgataataacttttacagtatcatagctttattattttacctcatatttaaataaaaacttaacatttgtcttagttactgctctactgtggtgaagagacacaatgagcaaggcagtttggagaaagtgtttaatccggggcttgcttacagtttcagagggttcttcagtgtatggttatcatgacagataatgtgttaacagtcaggcaggcatggtgctggagcaatagctgagagctcatatctgttctgaaaatcacaggtataaaggtagacaggacgtggtgtgtgattttgaaactcaacatccattcccaatggcacacttcctccagtcaggccacatctcctaatccatcctaaataggtccatgtactcggaatcataccttcatatgtgtgagcccatgagagccgttctcattcaatcacagcatcaatcatgacagggaatactaacgacatatggaacttcttatgcagcattctgtttcataaaattttaaacattatttatttatcagaggggacaaatgtggatcacaaggaaccagaccaatgttcttgtgagaatagcaacacaaagtcattgctcagagaagcaagcatattcagcctgcttctatcttccttttacttcacacaaggcaacacctctctattttctattttgctgatttaaatgtagccaggaaaatagggaaaggaagtaacatattaatggctcttcccagtccaaagacatttgatacatactgtttatctaatggtagcatgtgttgtccatgagtatgaatgtaccgatggtgagcccaccagacaccagtgtatgtgtgtcctggtctttggtagcactatttaaagaacaaaacacaaagccaggtatgctagtttgaatgagatgccctcttcccccatagacttgggcctcatttagtgaggctctttgggaaagattaggagatgagccttgttggaaatagtgtgtcactgctgcaggctttgtgatttcaaaagaccatgccagcccagtcttgctcattccttctgtctgttgcctaagaatcaagatgtaaagctcttggctattgctccagcatcatggttgcctgtcaccatgtcccgtctgtgataatcactgtctaaccccctgaaactgcaagccaccaatttcgtatgacccctttctgtataagtttcattgatcatgtattttcttctcagtaatagtaaccctaagatagcccagtatgattgtttttgtttgttcgtttttggggagtgtagggggagagatgttgagaagtgttagaacaagatgagaacagtcagaatttagtctgtgtgtgaggggtgtagaggattgtcaaagagcaaatttagcgaatctaaaattattttttaggttggagagatagattgttcagtgtttaaaaggccttattagttaagtgtggtgacatgaactctgatcccaggttgcatataaatgctgggttctggacctgcctcataagagagagagtgagacagaagaattgagggaagatcgccagggctggggcaagtagcctatctaacatagcctaacaacagacccaatcccaaataaggtgtgaagcagggatgaatacccaagattgttctctgacctttaaatgcatgtaatgcatgtgcctctgtgtgtgtgtttcttgtgtttcttgtgtgtccttcccacacacacaaaaaggaaagaaagaaagaaagaaaaaaaaggaaagaaagatatttagaaatattttctaatgaaataaaaagatctttttcacataaacaatagcatgaaaacatagttcacttattccataactctcatttcactaagctgaaataatttaagagaaataatagtaaattactagtaacaagactaaagcagtaatgtactgaatttgaagttacagaaagcaaagctcttgccaatgttgttgtgtgttgctatttaattgactgtttggttgccatatctgagttgggtcctctgcagatttgtcaacatttctactttgctgaacagtattttatggctcagtttttaccatttcttctatctacaagaaatttattaatctacctttatctaggtgtcttttctttttatattagtcaaatatataaaggggtattgatgcattcttaatattcccttcaaaggtttgacaatgaattctttctaaacatagtggagcctattgctttagcctcaggctgttttcctgtgtttaataaggcagtcttaggaaatgtgtgacttatgccacattctgggtgctttgccaagtacatataaggtaaatcttagaaaagtgctgcctatttctcattcctactgtgtttttctttgacatagaaactcataaacacacccagtatgagacaatcaaataaatttaagaaaaattacaagggaaaaatgtaggatttatttcctgtaaagaggaagagagagagagagagagatcaccattaagatttaaatattaaagaatagacaacaaataataaactagcttgtaaaatgagaatgtctcctaattcaacataataggcatacatcagaactgatgtcctccttaggttgtataatggtatattggcacttgctgttatttaaatgtcatctcaatttctttttttgtagcatggatcttaaccttgtaagctctaacttgtctgggagttaatgatctgttttatgagtttaatagttcttagtgaaagaatattggattatgttatgcagtttgaaatgtaacttgatttcttctttatcatcataaatatgacagtcttagttgtaatcagggacaatatattttttttcttcttctgttgctatacatagaataagtgcataagtttctcttgatatttttttatcttggcaattctatttaatttctcataaagaatattctttcttaacatttccagactattatattaaagccggcccattaagaaacactgtatgctacgaggattcttaagtggccttgtcagaatttaggagactcttacatgattttatgttttaattttctaagggttaaactcgaattggagctaatgtaactgacaagagggaaactgaagcaattggcttgcactaaacaagttggaatggctgttaatgtgaatgactttcaggcagtgaatgtcagggtgcagtagattactttctcttcctcgggcactttaagccatatcctgtggtaggactgacataatttctcttcctttcttgaaactgggaagcaaagtaattggagtttggtaattttggcctatggctgatgaaggtaaatcataatgagctatggaatacatagtggcaattcacacagggcctgtagaatgtgaagtttctgaaatatgttaatcaaacgttgttgctttgtgatttatattggagaaaaccaaggcactgttaactatggatctgacctgtttgggataagtttcacatgccaagcgaattgcgtcacaatgaaagccaccatgttctttccacgtggtaccctttgcattcagagggagtatgctattttgaggcagtttcttgtttgacacaaactagctgaggatttaaaataataaaggtaaaaaaagattcctgatcatctggattagcccttttccttaagacacataaatacatggtttcaaacacataccaaaattttataaataaattatttcgaagttttgttcaattgctcatgctttagtttcatcattccctaccctatagatttctacattttcatcatcatcttcattgaaatccattttctaactacactggataagatttaaagaaggaatatttcagccaattaacagaaatttattaacaaaagatatatatcatatttatctacatcatatcaattatctcttactacaactcaataacaaatatggaaaccattaatcactctgggttagatattggagtgtcacctagattaatttggcttgtaaatgtaagaaagcaacttcagaaaactcgacagtgtggactagtcaaaggctaatgtagagttatctgtcataccttacatccaaatttctctattccagttatctctgtataaagtactgctcttctttatgacttccaactcttttccttatatgactaacttcccagggttactatgtgttctattcgataccccatgttatctccagtcactgcagatgtaacttttcctccatctccttgccaccattgtcccttccagtctgattggaatgaggtcttcttgccagtcactcctggtgacattttacaatcgcaattgcactatgcattttaccatgtataagcaagaactatattgccgcctgctatgaaaactattaaccactctgggtgtgagactcttccctttcagacttgctagatatacctgtatttaactttcactgcctaattttcggggcattttggagggggggttgtgtgtttgaatgaaacaaacagatttagcaaggaaaaatgacaaggaattgtcaagtgggagtgtctccaagagaaaaataaccaaacatatatttctttaactttccttaatatgaatattatttttctagggtgtggtaaatattataaacatcctagtaataatcatgttctaatttttttaagcttccagttgccctgagaaaataattttgaagaattctataaataccagattatgagtgaagtttaatattagtgtaacaatatatagtttatgctatggaaacaaatctcaatatagaaatgagtataattgggtctattttttctgattttaagaacttatactaaattttgtttctccatagccttcccattctcactgtgaattcatgttcctctgtgtactgatatcagaagctattaccatggagatgattgacacctcacatttatcttcatggcttggcagcattttcttaacgagggaaagtgtcaggaaaattatcgacgtttttggcccccagtggactctccaggataatgttcctctctttatgctggttttcctttcctcctagaatgtaagcagtgggagttagcactgttgaaagtagaaagcttgacttttattctgtaatttctttcaaaaaaccattttggattatgatgctttaaaagggtttcaaataatgggctttccacaactgttattttgtacataaagtttaaaatcatttgcagctagtgccagaggaaatgccagaactgaatctgtcccattttctcatagttttcagcagttgggaacaaacctatgttgtggaatatcatattaggaaaagcccaaaacatggctaaagtactgagagctttaatgtgatgacttcctggatggaaacttcctgaaaaagggttttatccactaccttcactcatcagcatcatcaattgaatgttgaaagatgcatgtgtgtatgttcacgtgtgtgtttgtgtgttgtctatgactatgtgtgtgtgcctgtgactttttgtgaattaaactttgataactactcaaaaatgctcatattcaaaaatatcttgcttctgtaatgatttttattttttatgtgaagttgtctttgtcctgttttggctttccaaaccttttcacaatgcaaaggagttgtttttgatcttttaactcccatgctcagattccaaagacaaatatctgcagtaaggcatagacagtactgtcagcttccaagtcattttacatatattaaccctgggatctaagggaaacttcaaaaattattccctgtgaggaacactattacattttcagatacatattaaaaagaaccaagatgggactggatagatggatcagtagttaagagcactggctgctcttccagaggtaccagcttcagtgtcagttcctaaaacgcatattgcagcttacaactgtctgtaattctagtcctcagtgatccaaagccattttatggcctctgtggactcaaagcatgcaagtgggagtccacaaacattcatgcagactcaacacccatttacattagaacttttttaagaactaaggtatattagtaccacaaatacatatctacgtacatgttactaaagtgaaaattttttaaataggtaacaatttcatcaaagaaaatacaaaaattcacacagatgcctgtttgatacggattgggaagtgggaaaatggaagcggatgtctccactatggtgtgcattgggagtgaccacaaagctgtgttcagttaaaagcactggtgttcctgtgatctttaggtcaagccagcaagctgttgcacacttgcataaaggcctgctatttattttatgctgatggcatattgtgcataatgtattcagacttgtccagtagccttgacctaactgcattaaatatgcaccttaagctgggcatgccatgttacttgcctcgaatcccagcactcagagacaggctgatctttataagatggaggccaacctgatttacaaagtgagttctaagacaactagggcttttacacagataaaccctatctcattccccccagcccccacacgcatctcaatgagcctcgtctgttccctttccagggcaaatagagccccgttagtatgagctatacacagaggctattgaactacaaagctgtcatttcatcctgactggattcgaatggtattttgagattattcatgtttagtgactttaaaggaaatgtaaaagctgtttgaggaatctttttgagcagtcacctagtaattcaactaaacatctgctcacctgcagttgaagcgatgacagtcccgtggttcatttggttgactctcatgttcttcatctatttcattaatacatgctgatatgacatatccactcaagcatcactgcgtcatcacagaataacattgcattattgctaatagatattaaccacattttctatcctatttctgtcaatctttcatgttttcatgtttagttggtatgaactactcacctgaacctgaaaggttgcacctttatgactaatagataagaaaatctgtttaattgatcaagtggccaatactgacgataaataacaagaagaaacccataagtggttttaaaggaaaaccacaggcttggagagtggagagatggttagagattggcacagttgtttttccagaggacctgagtgtggttctgccactcttggtctctagctctagggcagtggttctcaatctgtgggtgagacccctttggagggtcaaacaacactttcacaggagtcacctaagtccattgggaaacagtaatatttacatgacaattcatgacagtagcaaaagtacagcaatgaaatgattttatggttcaagtcagcataacatgaggaactgcattaaagggttgcagcattaggaaggttaagaaccacagatctagtggcttctatgctttcttctggccccattgtgtacccatacacacttagatgcccacacacatgctcacacttaaatacttaatcttggagaaacaaatcagaatgattggtaattagttttatgaagtatatcatgttgggacaaacagacaaattggctaatcaaagaattatttttctgttaaatcagctttagaaatgcttcttaggtatatagcatcatattagtgaccttgcatttttcagtttttattgttatcagctttctaatgcttcgtggaaaatgattgatatcgaatccaggccagagaatgtaaaagacccagaaatttctagtaacaccataaaacaagtaaatcagtataattaaagtcaccacccaagcctagcagggagcttgaagtaaaaatagctaaccaaaacttgggagaaaataagacaagaaagatagaaagtcacgatgttcccaaaacaaccctccccccccccaaaaaaaatagctcaaaatcatagtattaaatatttctgtcacactctctctgggtgcatgctgagaaattcacagatcctgaaaacttaagaatataaatgggcagtcatgcactatactgcctcatgtgtacactgttcctaggttttaactaatgagataatgaggaaaagtctccataaagaattatctcaggtagtgctgagagagagagagagggagagagagagagagagagagagagagagagagagagagagaaagaatggtattgatgctttgcctctctttgaaattaaagtgatagattttagcatcccagtatccacaatagactttccaaaaaaataaaaaaataaaaagtctacactttaatctgattgtacttctctgtttactagttgacaggaaacttgggacacataacaataatcacatacgaacaagaaaactagaataaataatccaggctcagtaatcagtaaactgtaatgtgaaagtagaaggagagaaagaggagacttacagcgattaaaagtttgtgaagttattaactgccaaaggatatgtggttattattttgatcctggtctgtacaaagccagtaattatcagttacacacatgaggattcattatgttcttctatatgtctatagatttaatatttgtataataatcatagcaatgaaacataattgtgcatctaattacgttttttaatgtgtattattaaccaactacctaattagtagaatctctaacagctgaaattgggttatcatttccattattttttaaattatctctaattgtatttttatttcctggaataaagtaattccttacatgaaacactgattttttttttcacatttcttgttaatttcaattgtgtgtatttattacatgtttggaaaatggggtgtgaggtagtataattgatgcctttttgaggtgttaaacacttcttcattaaccaagtcaatattgtcattacaaaatgtagatattttttccattataggggactgaatagactctttgaaaggaggaagtctcctctaaaataaagtggagtacagtcactaaactaactctccttatgctcattgaagtcaactagggcgatatcttgaaatcacagacattaataagagtaaatttgatgtctgtagactacagcagtatatttttaaagatatcactctagttaattgattatttttctagcctattcctcaaaacattcctcaaaatctgagagtttgatgatcttcgtttcctagaatgaagaataaacttagaaagcttaattgcataaagacatggccaagatgtgaccttgagtcagttttattaaagcgttgccaaggattcaatccatatttgaaaattatatgcttgtgattcttcactggaaatatgatatccagcacagaaaagttaaaagaatttttgtaatgtggttgcatgcaccttattaaagcatgggctgcagcaaatgtttgatgtttaaggtggggctagaccaaagtgcagagaggtgatgttattgcctctgcaaagctagggaaacacattttctgagaagcaatgtggtggaaagcagggagttttccgagcccaaggagtctgcccaggggatccaggccaatgcctgtcttgggtttctgctctacaaacatttgaagatttgggcaccctctatttttcagtatatatccaagccaaaataagtaaaatctgagatgattttgtgtcatgttaaagcttaaataaacatgaaataattatcaacctttcccctttttaattcagcttttattgatttctttccttctctctttccctcactccctcccttccttcctttttccttccttccttccttccttccttccttccttccttccttccttccttccttcctttcttccttccttccttccttttttcctgtcttcctgccttccagtatttatttatacattcattcatttacaggattcccattacagtgattgcaaaacttacagttagttttactgaacatgtagcagtaggtagacttgacaatgatagtaacatatgtgctaggacaacatacactttcctcccattcatccacattctgtctctttcaccactcaagttatggaggatttctgtaatccttaggaaacggcagtgtgatattgacctctgattccctatagcacacatctgcgagtagcaaacatgatatcaacttaaaagacatctaatggtgatgacttctgccaccatttatctaggtagggttctagtgccagtttcatctgagaagtcattagaaagcagtgctgttggtgattcaaatgggcttcagtgtctcagagaataatgttgtcatgtgcatgttaccgaaagctcccatttactgggactagtttacagatatgccttatatttttacattttctcagtcactctatgatgtatgtgtttaatctcatttaaaataaatgaagagatactttagggagattaggtgccgtgtcgcagagtgaatactaggttgtaattaaactgtacccatgctgtctaatgcatcagtatgtgtgtgtgtgtgtgtgtgtgtgtgtgtgagagagagagagagagagagagactgcattagagtaacaaagaaaaactgttcaaaccttaaaacattgttaagtcaggcacatctacaacatcattacagtacgttccaccttaagtgaaccattctgctttagaattataatctatgttattctgttaaatgtattccctgtgctgtgctacagggattttgtttgctctctagtgacagtctacaccactgtatcaaagcaggctgattcagtctacagttgctttggattaagaagcctaagtccttcatgtaaaatgtggtcaatgaatttcccttgaaatcatgaaaacaggtaattaaattctgtcattttcccaaattttgactttattctctttgcttgttagttttttggaaagacattacagaatcttggagtaaaaggggtctcattcccccagcttttatgagcatgcaaatacatttcctatacactagtgattgctcatactaaatgaatcaatctatcttgacgtggaatttttgagcagaatttttttgataactctgaaatgatatgaaaaatttgcaaagatatgaagtgaaaggctaatgtattctttttgcccaatcagccagttcttagtctctgctctgattggtacattgaggaaatgctaatatgcttgtgtaacctgctaaggagcatcaagtcaacccccagaaaggaataatgagatgctaatggtcagcttgagggactggaattggataggattggagaggagcatttgtatctttttccagctgaaagagtatcttctctcctcatctcaacacaattactgctacctgacagagaggcctgcggtggaaattctccgagggaagatctttgtatcattattactatcaacacccattagttcataacagattctatagtctttttcttagtatatgctcaattacttctccatgtatatttatagatttggagtatcgaccacacaaagcagggatccttttcattttcaggcaagttcagccttaaggacaatgtattgctgccgttctgataatgaacagccacactctactaccctcccgataacgaaactacaatttgcttcttcttcctcagtggattgtccaggagaagctgaccatctagagtcttccattagtgtccctcttaagatagggaatggacaactaacttcacaagcagagacatagcccatccaggtgtattgtgcttataactctgcttccaagattgcattgtactttgggttagtgttttattgattacgtaaactatcctatacagatcccaatacatttctgcttctttctctccagaacattcaagattatatgtaaattgacattttaactgtctctacactagggctaaacttgtccatttttctgagttatgaagtagggggaactgaacaggcaagaaaaccttttgaagtatgtgagaagacagagcaaacatgaacttgacttgagggttttttttttcctactttttcctttttcccttctgtcattctttggaagacttggggtttcatgaattttctactcccaagctatatattcagctcccattttacttaggacaccactcagttctctgctttatttatatctatttttgtatgccttattcttgagtcaaggtcaccacatttacctgtcagaaggagatttaaaggaatctggaagatactgcgtcaaatgattgttactatttatagacagtctctccatgtgaaagttggaaattggtggggcacttagtgggcaccttgccctttgaaggattcaccctcattcctgatgatgtttctatcagttctgatgtctcaagacacgaaagagtcagcagttttcttaaaccgcttcttccatgggagagaggcactgggcaatgtactttgatgaccgttatctgaaaggccaccctggaagaagttagatactgtctctgagcccatagactatccttgtttcttataatttcaaataaaaagactggagaacgttctgatatctttaggtcttaactaaaatattacattttagaatgcttaaatatttctaaatgttttgcctcaagatattttgtatatctatattctgtttcatattctgcatagtatgcagttatagtaaaactatatactatttagacatgctaataataacagatgtagtattattctttctttataaagacaatgcttcgtaagataacaaactgaagaagaatgagctcattagagttgaacataagaaatattctcactttggttctcaagcacccatttttccaggccttttgtttgcattaaaacatgttcttaattgaagcaattttgtggtgcttgtagatattttcagatgagatatgatatatttgaatattatatactgaacagaaattgatattaaagtattacagaagagacttttacaaatgtattttccacattgggatgtacgtcaaaacatttctaaagccaccaagtaaagcacaattctgacaagcaatgaagaattcaaagaagtgtattaggattttcatcttaaagttggatttttttaatgcatagtttatatgttataaaaataggtcctttttatttcagttttgtgcatttcacgggctactacacactcaaattgtaaagtatttctgtcagccaatgaagcttactcatgcttgtcatgaaatttctgtattggtggcttcattctttcccagcatgcagcaccatgccatcacagggaataaaactttccccagatctgctggagggtccccgggactcacagcctagacaaggaccactgatgtctaccagccatcagtgtggcttagccagccagccagccagccagccctttcctgtagaaggataacagggtcattctatacaaagggggaagtgggcattttccaggatggaatgtggcacatggagttgaaaaaaaaaaaataaacaaataaaagatccatgggtttcaacgaaataggtaaacttaacacattttcttgagaatttccaccgtgctttgtctaagatgcctattttgtaatgggatacacgttgtttccacaccagtatctaggaaacataaataattagagagaacttacaaaattaagtgtagtattttaaaagatgagctcaatctttccccatcacttttagcattttgtttttgttgctgtttgagataagatctctctgtgtaatcctgaatgtcatggaactctctccgtggaccaggctggcatcaaactcacagaaatctacctgcctctgacttctgagtgcttgagttaaaggggtgcaccactgcatccagtgacttttaactctccaaaatagaatggtttttgtttctttaggttcaagaataaggaatttgattgttcaatttatttgctgtaatttctgaatttgtttacatagttttattgtttaatataattaaagtagattgagagtcttgtataagaaagaaactgaaaaaagaaaaatttcttttttcaaatatagaattgcatcactgagacataactcccatactcaaagccatgcattaataatacacacgtgttggggataaacacacactacgaaagcacacgtgtgccatgcctctgtccttcacctagacaagttcctgtactcctcgttaagtctattcctttttgtatgtgtgattaaaacttttaaagtaagttctaccctcttcacaaatatttaaaacggtgattgtataaattcactgctgccttgaaagtcaacatgtgttcagggttcattcttgccttgtgatatgaagttcctcatataaaggcatgttctttgtaatttcaccctagtcatcaaaaacattacggaaacacgtgtcgttgttttactgttaggaagttaactttattttgaagagcacagttggagctggatccacagctcagcagggggtgcagaggttctgggttcagttcagagcacccccactgcagctcccaggcatctgtaacaaggtcagggtctccagtgtgctcgtctggcctctgcgggtaacatcgtgtccagggtgcatttatagactttcagatgaacactcataatcatgaaatgaaaatgaatgaatctttaaaaagtgtatccttgctttcacaatactgtcttcctgagagacagatgttgcacccgtagcttttgtgctcatggcagaagagcagcatgcatttgttgttgtggcagaaataatgtttctgtgtttatgaaatgtctcagaggtgccttttgccgtctctaccctcccgaaaaacctcctgataattacatgctagttagtctcagttagatttttttctgcagttaatatattcatccagtgcccttaaatcatgtgaattaatgttctaatcggaaccttgggaactggatagtaaggaaataaagccattgtctttatagtactaagattaggtggagaaaaaaaaactgtaaataataattagataaaaatgccaaagaaattgtcagtgctgtgatggagaataatgctgacgaccagatgcagagtgatgggcaaggattatcctgggagagagtggcagatctgaggtggaagaggtcaagagagagccaccatgggacactccaggggatgagtgtgcagcagagcaagtggctaaaactgagtatcacgtgggcagggatcacactgcagcttgcttctcttctcacggtgtatcaccagaccattcatttatcactgaagtacaggaccataagagggaccctgggagaggtcatagtaatttgatgatgtatttgtgtggttttagggggagagtttatagtaatttgatgacgtgcttgtgtggcttaagtcttgcagattttactttcttcttccattacttcttttccttgtattttataaaaaatgtttatcctagatggcaggaggtaggcagggtctatgctgcagttagaggagatccaggctgcaaactcctgttagagaaaggagctgtggtgtgacttttgaggtacaagacccagattcatcctgctgcagtagaacaaaggattatgtcttcctatgattccacaaagaactaagctgaacaagtgagagtgggaggtacatgatgtggggacagagatgtgaagctcgggagatgggggggggggggttagtgggttgaagtagtagtaaggctgatagtgatgatgccgcacttcctgagttttagtcaagactggaaggttcattttggaaggttctcatctcgttggcatttgttgttgttatatttgattacttttacatcattcattactatcaagctggaaaacaggatttaacagggacttgagggttcttaaacaaagtatcaatagagaaaagagttgaaagcttataaatggagttccagtgatgtgttccgggcttagtccagtaagtggacatgagggtgcaatgcacagtggctagcatgaaagtaagtgacctcagagacccctgaaatgagaacaacagagaacatacccctagcagagcaaacaggaccaaggtgagagctcaggtggcactggcatttttgacatgtaattagtggtgattcagcaggttgcaaagaggtcacatccttttgctaatgttctaaagcattaagagtctcattataccatagagaatcacattagagctggggaatttagaggaggggctagcttaggaagagacatttacatgtaccgacaagacacttgtatacaaggaacagtctgtttctgtaatttttaccttccttccttccttccttccttccttcctttcttcnnnnnnnnnnnnnnnnnnnnnnnnnnnnnnnnnnnnnttcttttcttcctcctttcttccctctctccctctcttctctctctccctctcattttgttggaggtgataaacatataacctaggacattgtgcatgttatgacaaacaacattgagcacaagcaccagccctcgattactttttcttgagttagttttagttattcctgtgtacaggaccaaccattatccattgaaaggaagctcacagccaaccattggactaagcttggggtggggtgggagcagatggaggagttagagaagggactgaaggagctgaggggttgcagccccatggaaggagcaacagtgtcaacaggccagaccccctggagctcctaggaactggaccaccaaccaaagagtacacatggagtgacccatggtgctggccacatatgtggcagaggatggccttgttggacatcagtgggagaagatgcccttaggcctgagggtgttcgatgtcccagtgtagaggaatgccagggtgggaagataggagctggtggtgggacacctttataaaagaggcagggggagatggcatgggatagaggggttttgaaggggagacctggaaagggcaaaacatttgaaatgtaaataaagaaaatagccaataaagtaaaagatacaattttaataaaataaaaaatatagtacctttgaaaagaaaagaaaagaaaagaaaagaaaggaaaggaaaggaaaggaaaggaaaggaaaggaaaggaaaggaaaggaaaggaaaggaaaggaaaggaaaggaaagctaacttgaaggtgaatccctggtgaggaatcacatctttgaaagaatgagaacgcaggagggactggcccctggttcagtagcaggatctcctggttctcattggccccctttgtctgggaagaggaggcatgggatttacagttgagaattctttgttttaacactgagaggggacagtgtagtatactacaggaccaaccattattttggaaaaataataccaagactggagcaatggctccccggtgaattgactttgttcaatgagagaacctggcctgggttcccagcaccacagggctccttagaactttccacacagaagtttcaggaaatctgcaacaggttttgttttgttttgttttgttttgtttgtttcttttcctgggtggttaccagacaagaagtaggcttggggagcagaaacacatttttttttaaatgtactgatttttctgatttattttttctacgtttcttaactgtaaactgcttaaaagaatgtttctaacagacaacttaaaagaatgttttaaatttgaaattaaaagacctttaagactcacattgaaggaatttaaaatgttgttaacaagcatgtgtggggttacatttgacttctgcttcaatgtggaatggcgaatactccatgaggctcattcatacctcatgaaagttagacattttttgtttgtttgtttgttttgttgtttgtttgtttttccgagacagggtttctctgtatagccctggctgtcctggaactcactttgaagaccaggctggcctcgaactcagaaatccacctgcctctgcctcccaagtgggattaaaggcttgcgccaccaccacctggtttagactcttttttattgagaaatcaggttgattttttatttacttattctaattatcttgagtccacttttctataaaaataatagacacttaatttttttttgagtattttcatctgggagcaatacatacctacatttgtaagccacgtccatgatagcaaaacatgtgtaacctttgaagtatttctatttttatcttatatttataatttcttgtgtgcttccaatgctttccttgcctatgtgaaaggtgcgatggatttgtgtacctgacatgatatcaatttcttttagttggttaagcataacccacctgggcaagatcttaagtcctgtggtagactttgtactcttccagacagcttatcagcttctttgcaggcttctcaacctgaattttatagtaaaggtgaatatatttgtgttgcttgctgagctcatattctgaacaactactgctctctggttctatgtgataactagaaaacagaacgtagtaagtccagggtcattatttccaatcaaagcagtgctatgtgggtcttataaatatgcacatacatatatgtatgtacctatacattaatatattaataggcatattgattcaaatgcacacattgacaaagtgtattttaaatgcacaaatgaatgttactgtgtgatctttttttgcttgtcttaaaggaacaaagatatgaatgttttggttttttcgatttggtttggtttggtttggtttggtttggtttttttgagacagggtttctctgtgtaaccctggttgtcctggaactcactttgtagaccagcctggcctcaaactcagaaacccgcctgcctctgcctcccaagtgctgagattaaaggcgtgcaccaccaccgccctgctatgagtggttttattgagtaccaagagataaatgctgtttccagctaagaagggtttatcttgattggaatgagactattccatcttcttttcagaatgaacatccttccaaagctgaatgcaggccagggcacacaactgtttcagtgtttgctttttgcctctctatcaaaatgagtgataaacagattataaacatctcgacgcataaaaatgaagttttagagaagaaggccaaagggagatcatattatttcattttaaaaaatgaataaatagcaaatgcttttgctaacaaagtgaattaacccatcagtggccatttgaaaccagttgagttgacgcatagtgaacttgatgtatgagcagcaagacagatttgtcagaattctgcctttagagccatattgcttgataattcttctcgtattggaatagccatattgcaaacatcctcaggatcttggtccctgaaatctctgtggatagttttagggaggggatggggaagagtcgcagtagggtttcgctctgtagtccaggcttaccttaagcttacagagtttgtcttgaccacagggtctttgtttacaactgtgaaccaccactgttttattttccagtggcatatgcaaatgactaaaacatctaaattcttctcacacatgttttacctcttggtgtattttgctgtgttccttgtaactcttaaggaagtatttgaagatgtaaatatttgtcccttggcaatttataatatttatctccttgtcatagcatataaaacatattactttgtctgcagaaacataacaatatttgtcaataatatgaactaaaattttgtttcttgaagaaataaccactttaaaaaaaaagtattgtaaaagtgcagttaatggttgatgaagcaaattcaatttcatggtaacaaccaggcttttgtaaggtttcaacagtagttgaaattagcacttgaactgtacactagagtgtacatttataatatgtttgagcaataaaaagtatcactttgacatatatgttttaaagactaagtttacaattaaattttaaaaatgcacacatttttctcctaccaatttcaaagccttcctatagaaattatatctcttccaataggaatttcatatgctttcacttgtttaactataatgtcttatatttaggtttattattcaaagtaatatgaaagatgagctgtcttcaatgtaaattgatattcttacatacactaccagtctctatatcaatataatacgtagccagggaaatttaaggagtttgtatacaatagcaaagttagtatcattttgatcatggatggagccattgatttcctttattgatgaataggaatgacaatttcagagtagtacaagctgttcacattatttgttgtcattgtgctttaagctctttcgggtttatttttaaatatccttccttcccttcccttcccttcccttcccttcccttcccttcccttcccttcccttcctccctccttcctttcttccctccttccttctaccctccctccctccctcctttactaccttcttccatccccctccctccatttctttctttttccctgcctgctcccaccttgcctccctttctttctttctgatatataatcttactttatatctcagatatagcctagaactcactatgtacctcaggctagcctcaaacttgtggcaatcatcctgtctcagactcttgagtgctgggattataagtctgagctgccaggatcagctttcatttgaatttttaacaagtcattctcagtgtatccaggctttaaaaaaaaaaaaaatactggagaaattgcagtgaaaccagaaaccacagtgccctacactgattggtatataataggagtcagggtggagagctggaatagagcctaccctgataacactttatttggtagcctgccttttatttcaaactgtacattgattttctgttccagagtgatcatcagaaaccctcagtaaaaagacatggggatttagatatggtatatccattaggcaaagaaagttaggagaagggaaataggaaagattcattctctgtttggaatttacaatttaaaaagaccctgatcatttaaaagatcattgtcaaagttacatatttcaagattcctaactctggtcttgatcgcagttttttagcaaaaatttgtagtcttttaaaacttttgtttcataaaattccactcgttgttatgctagtgattctataggacaggagattttcatccttttatttaattttcattttttgagacaaagtttcctgtatctcagaatatgtttgaacttgctatgtagttagttataacttcaaatatctaaacttgtaagccttttttttttcctcacagccctagggttgtaggcatgaaccccacatctggtttatgtgacactggaaatgggagccaaggttttttgcatgctaggtgaatacgccaccatctagttccaggctctccagactttctcctttctcatccactgataagatcactctaccatctagttccaggctctccagcctttctcctttctcatccactgataagaccactctaccatctagtttcaggctctccagcctttcttctttatcatccacttttaagatcactctagactgttggtccataggactccactgatggtggactgaattgtcttagttagggttttactgctgtgaacagataccatgatcaaggcaagtcttatatagacatcatttaattgggactggcttacaggttcagaggttcagttcattatcatcaacgcaagagcatggcagtaaccaggcaggcatggcacaggcagagctgagagttctacgtcttcatctgaaggctgctaatagaagactgactcccacacagctagggcaaaggtattaaagcctacccccacaaggtgacacctactccaacaaggccacacttcccaatagtctctggcccaagcatatacaaaccatcatatgaactcttttccatgttagcttcttacccttgccatggtttctattatgtttctcttaacttgggaggaaatggtttatttcacttacattttcatcatctccaaggaaagtcaggaaaggaattcaagcagggcagttacctgaatggaggaactgatacagaagccatggatgagtgttgtttactggtttgatcctcaggacttctttagcctgcctgctctcctttctttgtcccttccttccttcctccctttcttccttccttttttttcctattctttctttcttatacaacctggaatgccatccaatagtgtcctactcacagtgagttgaacccacacctccccatcaatcattaagaaaatgcaggacaatcttgcctgcagcaaatcttactgaggcatctcccttcaacagataatcctagcttatgtcaagttgacattaaaaactagcgaccttcctatctttctgagatttttctaggaaagaaatttatacaatatcagaattgcatttggcccacgctgtttttaacattgattagtcctgtattttgattgcaggaagtccaaatctctgtccagtgtttgaggttctccaccaagaatctgttctctgcctgcttttgcccccatttttatcttatgaaagtgtaaacttccactagacacatcctcccctttctctgacctcatgctatttaccctgaagcacggtagctcactctatttaccctttctctgaatgttactggtggctagagctgcatgtattgcttaattggccaggccaaccctctccaaccccatttgattgaagtctctttgggagacagaagcagatcgtttcttttgtatttcccacatgatttgaatgatcaagggtactctgtgcaggaaaagcactcccgtgattactcagtgtgtccattaagtttcccaagcacaacaccctgtgttatccttcattactctgccagtctaataaccaaataaaagctctgaaaggcctggcattgcttctgcttgagagactgaatattgggtttgccagagttccaggtggttgatcaaaaaactatgctttaaatagaaaagtgaaattgtttagcttgtcaaatgggaatacaaaagaccaggggttattaaggttaattggagaaggagaggtaagacaattcagacctgtttttgtgttgcgataatgtaagtgaatgtggtaagaaaaaataaaataccaatatgtatccaaaatgggacttacttattgagtttcaagtagagataaattctgcattcccacatagatttgggataaaagggcaaaaatgcagacctacatttcttcatctctttcctaattttactactatcaaagagggagggtgcttctttgttactttatgttctttttagcacctcatcatatgaaaatttaactgttaatatgaatataacgaacacagattatagcaactagccaagaagatatgtttccccatagaaaataaatggagcggtcattatacaatacttggaaatacatgggggtgcagagggataagatgtcatcacaccatcaggtggagtgtatagctgaaatctacagcattgaagatgtccacataggatgtgttatagattacatgtatgtgataacaagcaaagcacaggtgcttattttcattttagaaggaacaacatggtacttagacatacaactctttataccagcagcaggaatcttaagtaagagataaaacattgtgatagctttaccaaacaggcaatcaggtagatcatagatctggttctatcatccaacagcaagttctctaacctgtcaaaaagcaagaatctatctatgagaagctggagtaggtaagagatctcagatgctgtttttgtggatgcaaatccatccagagtagaccctgctatatccaacattaactgaaaaagaaaatgataacgtggcttttgcagagactatgaagtagctgtggcttttacacagatagctgagcttcttccatgcaaagaagttattctaagaaatggtctcccatagtggtggggaatggtaagtctcaagtctaccaggcttactggctccttgggaattcttgaagtagatgtcaaatccttatgctcggaggtcatgtccaggcagaacttcctctactgttaaggtcctgaatcttattcattctgccctcctctcccattccctccctctcctcccctccctcaaccaaacacatagggttttatccacattactgagtctactcgttaagtgttcattatatctaagaaagaagtttgacaatatctatgttctactgtgccaaggtcttctagcctactcaagcttaacatttgaacctaaccagcacttgagctatgaaaaattcctgaaattcaacaaaaagaattcatttttaaaattatttagaaaaatcctaattactgttggaactttaaaagacaactttagaaactggagataaggctgcccttatagaagagttatactaaggaatatgggtatgcttgaatggggaagtaggactagatacagccctacaagtaagatatggtttactctgtcttttgttgggatcaccagggaatattcacacttgccgtcacaatagtattattatgagacccttcagagccagcaagtagaactcatgtttttccaaagtattggaattttatgttttctaatatctatctatgaaagatatgtatactattatagaaaataaatgataaggatttctcataaatatgtaaaaatatttaatatattatttttaaatacttaaaaatttccaatattagttataaaaggtttataatttattcttttacttatttatttatttatttattttgctcgcttgtagcttttctgcttaatggcacaccaaaatcccggctttcagttttacttagtaaaatacatttcctcaaaatgtaaatcttgtctcttttattctgcaatgaagtctacaaatggtagcttagtgatcatgttgctcatcagtcatgaacacataaactccaggttaatgtaatcatgccaggaggattctaggaaaaaaagaaaaaaagaaaaaaaaaaaaaagaaatcgaatatgtcagcattattgtgaaaatttttgtccatgcaaatgaaaaataccaaggttttctaccctcataacctctatgtgctacacagaaaagtggggaaatatttggtgtttccactgtttactttaagccagtgagaattataaagctggaagaatccttcacaaactgctgactgctggtgtttggcaaatcacactgttctttttgcccttctaaaatgagattattattcagtaagaaacaaggaggttaaccatgattattgttctgattaagaagtgctttaggcctgagtgaagcacccttaggatgtgtctgtgagagactgtctccagcaggatgaactgagggcaaagattcaccctgaatttggttggccccattccaaaggctgacacccaggcttgaataagaatggaaaccagcaacactccctcccctctgtttgcttcctcttcctaagaatgagcctacagcttccctatggagtgcctttctcaccatcatgagttttcttgatctttgagccaacatagcctgcttcttctaaggtacctagtcacagaaacaaaaagatcagaagacatatgccaaagagacacaaacaaaacatttgtgcaaaacattgccctttcaattaactgcaagtgtccctagatcaatgcaattttcaacaattcttctgctgttgtctgtaaagttatttattttatggttatgtgcattaagtctgcaagtatatgtgccacgtgtcagtctggtgcaccctgggaggccaggcgagggtgtctgaatccttggaagtggagcaagaactattgtgagccactgtgttggtgctagaagtgaaaagccaatgctctgctacccatctctccaaacattactcctcattttttaaaaattaattttctcatgaattaattctttcctgtgctgcaaattgagtcacttgcctcttttatgctaagcaagcattctacaattgaccttcccactccattcctaacccttaatggctaagatttttcttttttgttttccttttcttttgttattctttggtttgatatttgagacatggtttctctgtgtatccagggttggccttaagctttgaatcctcttctctctgcctcctcaagtggtaggattgcatgtgtgacccattgtacctgtttattacatgtgtaattccttactaggaatgtatctgtgctatcttattatgtagttgtgtggtgtgagtagatctcttagtttccatatcttttgaatacctttctatagagaagtccttactggtatggatgatctgtcaacaggtgttcaaataatattgatggaaaaaatcaagcctatttttttgtgtgaaagatttttacttatttattttatgtatatgagtacaccattgctttcttcagacacaccagaagaagacattagatcccattgtagattgttatgagccaccatgtggttgctgggaactgaacccaggacttctggaagagcagccagtggccttaaccactgaaccccttttcaagcctgttttttaatgtgtgtgtgctgtcaaggatgagcagaagttcacgaaagatggctgagcagttctgctatgatttggctcttttatgagctacacaggcacacagaaagcccagtttttatgtagtagtgatttttttttcaagaatgagaataaacagaaactttgatttgtgatttcaatgaagtatgtagtaaacttaacaaatattttgataatttgctcacatggttgtagtatattagtgtgattgcaataatgactacagtagaattcagcataaacagtattctccagagatgagacacatgggaaccaggaggagtgactatcacccatgacatgcccttgtcctgagatcagagcccataagtgtttcaagtcgtgactcactatcttctgctgaatttttgtatgcattttatttcagtcctttaattgcggtagagttcttagctgtacagtagtttgtaatcatttgtctgaaaaattgatttgtgccttgaacacataattttttgttcatcaatgagattaatttatttaaattgttcatatacaaattactgagtagagcaacattttccttccacaacaggagaaaagctcgtgaacagccccgttgatgggccagtgcacatttgcttcttgctacagaacattttcagagtctgttgcctctcatttgacattagttagcatagtgcttggagaaataatcagagttccttagcagggtcatcgatattttaaagctcagcccagtgtttgttcggcttaaacaaacaaacaacaaaaacaaacaaacaaaatattaactctacttgacttaactttgccaggcatccattttatttctagatgagtggcactgcaagaatttcagccagtcccaagtcagagatgaatttctattatgttctgagataccccctgactgggggcagcactgaactaattttgctgttgaataatagttaattaacctgtcatcccacatggagtagactagagaattctaggtgatggtctctcacatgatgtggctgcccttgaggattatttttatcttcttctttggttcagatctccccctgttatctaggtttggctaccagagaagagttgtttgagcagagcagtgttgagatttggaaaactgctatattgcaactgctccttcatcttgcagtgactttgggaaagcctggttatgagccgactgctcagagctttgtcctgtgcaatcgtggtccattttttccatgatgtttcttcattgcttcttagggaattgatttttctttactgtggatcacctttcccttggttcagtccacttaaaatgaagagggaaaaaataaaaagctggggcaagatcacaaaccatctgggaaactgaagaaaaagtaggtacttctaatcccatgagacttatatgatggagagaaattgtgacctaaagcaaacacggctcactcatggactcatgtgattctgtgagcaaaagctgaccaccaggccatagctttaagacgtgattttcttataaagattacaattacagagttgtttgtttcatagcaactctgtccaccaaatgcgatctgttcctgattctcagatacccaaattaaatgtgtagtcttgcctttcccataccagtgtcatactctgttagtggcaatatagttcactgcctgatcatgtagttcctagttgatcatacatttggtaagtgaattgctgtggcagttgacatattgaactcatttaatgtgataatttaaaacaacagcctggtatttttcctgttatgatcagactgtattgaattcatgtataggtatgggaattgcatgactttaatagacagtaagagaaagctatgatgagacttgcttgggagcagcataggatgggcatgggcaatgtcctggatttgaggtgtgtagcagttgatgagccaggctcagaggcaagacatgtgaatctattttgactttcacatttgtcatgacaataaaagtcacggcttgtgttctcagttgttaaaaaggcaagcttgacaatagtgtttaaattttattgctgagaatatagccttcaaaaatgtataatgtttgcatggaaatagatttggtcttacagatactatgagattttgatctttaaaaaatgaaacaaaaattatagtaagaataaagtagaacaaacaacactccaaaggacattcctgaatttgtaaccttaggaattagttttctgcagtgttgtgattggaaaatacagggcctgagaagacaccccatacaccatgatcttttagcttcttgtcatacactttctgaagagctatatattcagagctggtaagatcattgtctgaacaggacattatctgatgacactcgaaaagtctttagacacaaaagatagaagggaatgcttcattgccctccttggatggcattcccccacccccggaagtctaagcaagattaatgttctttactgacatgataacacctcaggctatttaatgactaaacagtatatgaagagtgggaatcaggatgtggttaataaaatgtatcacctgaatttttttttaaatactatcagtttgatactgttctggaggtaatgatattcaacttgtgaatgttttatataaaccatttatacacttacatatacatgttggttttctttgaaatgataaatcatctcatatttgcattctcttttccatcacaggaatgtgctggcatttcctgttctcttcagctcaatcccgtgagatttggctgtataatttttctctttaatgtataggagaaagtcttagaaagaaacacaaaaagtttcagcttgcatattatgattccttaatttctcatgatcaaaactagtccctaatcaaatataaaaaagtagcagagtttcataccatcaatagattcagcttcaggaaagccaggtattagtttttgaatgagccacgttagtaaggaaaattacccacatatgtcaggtcctaacagctgtattgagatggcagaccatgaaaagtgtcaaagtgtcaactgagaaaactctatagaggtattaatgtggagaaggataacatcaggatatcagcacagacccacttaagtaaatagagggaaaatgtaggcaatgcaaatatgtgattttcagaacaagaaagaagactgactagatcaagatggcctgcttctgcaaactgtgggtcagatcacagtatgctgaaatgattggaactcattgactccttttgcacactgtacatgggacatcatcgctaagcagcactgtgggaatgcatgtcatataatttgtgttcctcacatagcagtccttcattctctatctgtactagagcttcacactgataggtgatagtctattaacatacaaattagcttgccattttattttattttattttatttttattttattggttagtaaattctatcttttttaaaaattagatattttctttatttacctttcaaatgttatcccctttcctagttttccctctgaaaaattcctatccactccccaccccccactcccgtttctccccaacctacccacccctgcttcttggctcagggattcccctatactttggcatagaaccttcacaggcctctcctcccattgatgaccaactaggccatcctctgctacatatgcagctagagccacgagtcactctgtgtgttttctttgattggtggtttagtcccagggagctctgggggcattgcttagtttatattgttgttcttcctagggggctgcaaaccccttcagctcctttggtactttttctagctccttcactggggaccctgtgctccatccaatggatgactgagtatccacttctgtatttgtcaggcacaggcagagcctctgaggagacagctaaatcaggctcctgtcagcaagctcttgctggcatctgccatagtgtctgggtttggtggttatttatgggatggatccccaggtggggcagtctctggatggtcattccttcagtctctgctccaaaactttgtctctgtaactccttccatgggtattttgttcccccttctaagaaggatcgaagtatccacattttggtcttccttcttcttgagtttcatgtgttttggaaattgtatcttgtgtattctgagcttctgggctaatatccgcttatcagtgagtgcatatcatgtgtgttcttttgtgattgggttacctcacttaggatgatatcctccagatgcatccatttgcctaagaatttcatttcttccaaacagaagagccgtgcctaaaacagcagcgagtatgtctaaaatctggtggagtgatgactagtcactctatcagttgcatcactatgcaggcttcagtcagcaccccctatagtactagtgattctctaatactgacagccatgttttagaaagttaagttcctttatgtgattcctggatgtgtgaaggagtggctctctgattcttataccttctcttgatctcttttgttctctttgctttatctgattttgtttatcttattaaattctattttattgttatcccctagaagcctgtttggtttctgacaacagacagatgtgcgtggtccagatggagggagaagaagagaggcactgggaggagtacagggaagggaaattgtaatcaggatgtattatgcaagaaaacaattctcaataaaaatatgactgccttccagaaacataacaaatacattaatctatagttaatgtgagtttagaaacatttataaagcagtcagagtaaacagagtattttcataaaaaaaaaaaaaaaaggtgtttattctggcttcagataacaattaatgtctttctgcttcagagtccatttgatttctgctctttctttagttttcacagtgtcaggaaaattctaattcagatagataatacattactgaaaaaaatacaattaataaatttttgccattcaatgataatctcttatcaagctaagaatacaatatctggaaaatgttattttcatgctccactaagagttttaatatgattttccagggctaactgacaggtcctgatctggctggaataaacagaaaagcctttctgagtaccatttttaaagtggtgtatatatatcatccagtacagtggtccagtagagaacatagcacacatgctatgttagagatagttttctaatcatgctctcttcagcatcaaaaccagtaaattcgtcattcatctccttttctaatttgcttgatataggtttttcaatttgttttctaatgatcctgtaactttagttagtatgcactttgatatcttctatttcatcgctaactttactaattttggtaatatgtttctcattgttactttgcagaaaggttttggatctcttttgaagaaccagctctttacttcattactccttcatattcgtctatttgcatctatttcagtcatttatggtctgattcatttctgtctgcagagagttgctttgcttggttctcagatgaacaacttaatgatgcacctcaaacccttaggaaaacaagaacaaccatctatctttaatagtgtacctgtagtgtgtctcatttctgactaaactctgattttaacaagacagaggcactgctataattgagactgcaggtgctataaagtgcaaatagttggaagttacctcacactgagaatgtgttggacatggcaaccagtagttgggacaccctgtggttatttgcactgtaaccttagtgtgctcataataggttttaatgtgtaactttaatcaactaagttaactactccatcctcaacaacctaaccaaatgctaagataattctagttctgtttcatagttgttaaaatgaagattagaagggttaacagctattatgttattaaccagtattccacaaatggtgtgtgtaatgtgtttagtgggtaggcttaagtcataacccttggtgctcctaattgtgatttttatttgaaaatgggatctattggctataattgagatataaataacttgagattaaggtagatttttgaagtcaataatggccatataagcaaatgaagataaagaatgaaataatcatggaggaagagacaaagcttgaagctatgttaattcaagtgatggaacgtcagagttgaccagcaaccctcagaatataggagatcagcaaaggatagtttctatgttgcagtcatagagagacctaattctgccaatttcttggctttagatgtctagtgtccagtactatgggattacgagacagtccctgaattcctatgataaataatcaatcaaacaaacaacaaaagcaaatgaaacagtttaaagaagtgcaaaggaaggcatttttataaatagatgctataattgccatgatgactctactagaactttcctgaaaatagtaatgaaattcatagtgtcacatacaaaattttaaaacaatacaacaattgtggatagtttgaatttgaaacaataaatgccttttaagtaaggcctgttaatagtgtaaaagcttagatatacatccagcacagtgtctctttgtagaaattagacaatagtgatgaaattaaaaacaagtagttgtgtgaatgagaacatccgtaatatccgtttttaattaatcaaaattatttaggtgatatcaataaattgattctaacagtcctttgaaaaaggttttagaatagctaacatagtactagagaaagaaactaagctggctggcttctaccctctaatttgaaaaatatctaaaaagctcaagaagtcaaatagtgaggtgtgagataaagtagtgatgcattaaagaatgcaaaataggatcatacaaagtgagtcaagtgattagcattgtcttacaatgttgtagttatagcccgtcgtccagcaatttcattattttccagcaaattaggattaaagcaacatttataccagctgtatatgtaatcaccccaaaccctaagcaatcatggtatctttcaattacagaatgaataaattccgacccactagtccccactttatacacagggcacctgagccccaatctctaacaaatacttgcattacacatagaacaaaaacctgttctgtgcaatgtttcttcattaatttatagattaatcataattagcttaacaacaatgacaattgaacagttgtagctatatactataataaaattgctgacattgctactcttagatttggaagacattattaatgtattacttgaccatggccgcatggatacctacatggtatagttgattgcattgtagacactgtggaaattctggacagagagatgacttatgtcccaggaagagctgtatagcttgcaaatttttcatgttattcaaaatgtagtgaaatttaaagctgtgcatagtttatttcatttagtacgttcatgtcttagatgaccgggggtaactgaaacctgaaaacacaaaactgcatctaaggcacttatggtttgtgtgtgttgagggtgatggtactttgtatgtatatagtgtggcagtcagtgactgaaggaataaaaatcagatcgacagaagaattttctgcatctgaattgtctgagatagagtaacaccaagaaagatgttgtattactccagcctcaccagttggcgccataacatcaacttcaaacacccttccatggtgacatataaaattaacagttccagttggaagaggtcagtggttgatttgggtctgaggactagatagtataagagacacagtggagaggtgttttttttaagacaataaaacaattgtagtatgttgttatggtggtcacagtaagactaattatggggaaaataccagagaaaacctgatgcagggaaagtctaaaatgtgccttgtgagagttcccaaaactgtctagaaactacattccgataaagtttatatcccagaaggaagggaaatgaaaaagacaggaaggcaaagaaaagtaacattgggtacatacctcagaataaggaatttggtaatgtatcatgatgctctttatattgcacaatattcataataggatactactttgatataaatgggtactgtgggacagtctgagatttttctgtaaatctgaatgtttttgttatttagtcctgtgttatttgtttatatcgtaatgctattgcttggacattctgtggagtggaccttttgaactgtcttaaggaaggccagtcctagcttgtccaaaggacacagtctattcctacactattctaatggccagaaatctgaagctctgggcagcctgtaaacttatgaagaggctcagccttcctttccttcctagttttggtgacttaagcctttccttaatattttgtaaactttccaatgcaccacttgaacaagcctctgtgtacactcctgctttctgtgttgctctgagttctgctttccacatgttaaatgacaggcaccattgcaatcacaacacatgcaaacctgtatgctgcctttctgttatccttactttctgattgcctctgcaaagaacatcattccaagaaagcctcagttgaagttgcagaggttgtgacttttgggcagctattcaaactatttctaccaggccataggtataagatattgaagtgcgtccatggtgttgcaaaggaaccattaccgaaaatatatcagtttatagtgcagatgggctcacaggcagcctactaagcattacaactctcctaataatggttatgaggataattcatattattcacatgccatattattcactggtataactgttctttatttttggtattatgattatcctttatttgtagttgatgaaatcccagcaccaagactaaacagacttgcctaaaatttggtagctgttgaattccaaatctatgctaattaataatgtttacagaaaatctcttttcagacattcacaatctatagacatggggggggggtgtttgcatgaagtgttttgtcagcttcttggtgtgaagatctgtcagtcttatcttggaggatgtcctgacactgatcactacagcttctttagttttaggatgctgggtaaaatctccactatctaaccatcttccctttttttctttctttgttgatttccaatccctctatactttcttatccaggttacactcccataggtataaccctccagctactctaccctacagacacacacatgcatttatatccagttgatttttgtcttccccaaaggcttcaaaagtgagccttaataatggaaagattggttaatccactttgtgaagaagtgaagcatttccaggagccattacaaatggggaaatgtgaaatagatgtgtctgatgaagtaagtgattcaaatagaacaattaacagatggcagaagcaattacatattcacagttctggccaagagcatttggtagatataattaccttacaggtgttaaccgccctgtatcctagaatgagacatctctgaacactaagagacacagttaaatgatggatggtcacatattagcaaaccctccattggctctgttttggttttttgattttttttttttaagacatgaaccagaaagctaaattcagttcttggagtctaatgctaagttcacaaaaagtgaaacttaaatgggcaagcaggtgtggtgtaatcttcacattgattgcttgggtgggaaaatactgcacattaaaagacattttaaattcactcagcaattgcaaggtacaaagtccaaacaggcaatcatttatggaaaaggtagcagctgttatgacttattcctttgaggtttctttttaattacctgagtttcatatgcaaagcagtacttttagaccactttctaaaaaatgtttcctgagtttgtagttaagtttttcatagccttaagaggatcataataaaatatgattataagaatttgttactattttcacctccagctattttgacaaaaagttatttgaaaaatttagatagtctaatatttacacacttttacacacacacacattaggtcattcagacagttttactttattttaatttgagggtgaaaattagtgtttggtcctttctcataacactcgaattgggctgaaactttcagtaaagaaatgttaacttctactcatttaaaataggaaagaaagtccctcccccactgtgattgaccaccctgtctgaatctgaatttgagttttctttgaccttgtgccaccgcacatgtgtgtatacacatgcgtgggcgcgtgcgcacacacacacacctttgctttctttaagttgtactctaaaatacttgtgattgtttagccaagtattacttcaacagctattttctaaagttcttacacaagtgtgtcagtttctcaggtattttattctagaaataagttacaatcctaactacttacagtttatatatgcaggcctgtattctgccctctctctcccctccacttcttttctccccactcctttttactccatcttggagatggagcctaagtgtgctgaccagggtggcctcatacttttgagcttgcgggggtccacctcatgcagccttttaaatgctgggcctctgggcctagactaccattcatagttttctctgctcactttttaaattacattggattttttttttctgttattgctacacaagcaagagagggtgggtagcttttaacctaaaattgaggattaaaaacttccctggattagtttactgttttaagatatagtttcgagtacccaggtttcaaaggcatttatgttatgtactggtacacagaggcaggataagaaaaggttaaatgttcatggtgtcatagtatctttttcacctgtagagaaatacttttagtaatataaatgtcactttactgaaatgtgctataattttcctttaacattatatttgctatgataatgatcgagtgcatttcattgtgctgaaatacactgtaaaaatctaaactgatttcttctgtttcctaatgttttttgagtaatcctgatgctgtctcatgtaaaaaatgtgacattattctctcttggtaactgtgaataataaagaaataaatttcccataagatcacatattgccccctatataaagtgcagtcattgattcaaggatttattcatcagatttctagattatgagtgtaattttccatttctattaagtacaacttggaatgaagcttggtgtagagtgtttttgccttgtacgtctgaggctctgaatttgactctgaacataacatgtgaatgcatgcatgtgcatgcccatgcacacattctctcaccctcatacacacaatcatcgaataaatttcaaaagtcaacacttgccatgggcatacactatatatctttgatccattttgtttgtttgtttctgtaaaaaagactgctgtgttcaaaataaataacattaacttgcaagatagttgatatccatgtggtttcttgctttaggtcgaatatagctcaatttttagtctgtaaactgttttataaataaaaagacaaatttgtaattccatgctttaatcttttaaatataatattatagattcacatacctcctgatagtaagagagaaatgtgaaataaaaactgtagatctggaagggattttgtaaaagaagcaattgtaatcatccttagaaagtaaaatgaagtctaaattgaagaatgggaaccaaatataaaactaaagagtacagatagctttggttaagaacattttattggtaaatgttgaaagaacagattctttttcaagcattgacaccttggaagacatattatttcttaaggaaagagttgagttgtacctgtgttggtacagattcagagctagtaaccttaaatttactaatgattttactaatgaatcccaagagtcattatttgaagaagttccactgatatcataatattttttctacagtgaaaagaaattaacaatataactaaaagctcacatttttattcattgaaaaattaaatttcaaaacagtttaatctaaacatttggctattgcatacttttatattaataactcaaagaaaattggtagaggtaattttatttgcattgtttaggcttgtttgttttggtgtctgtttatttgagactaggactttccatgtaaaccagacaggccaggatcttgctgggtatctcagatttgccatctaaccacaatactcttgcctctgcttcccaggtacttaatatatacacccaataacttttaacgttttgtgttcatttgagactaatgtggcattcctaattgattttctgaagttcctaccttatatttttttcaaacaaaattatccatagtagaagaaaaagtacggagatgcacagtcatgcctaaagcatcggaatgatgttagagcagtggcttctttcttcacttctcaccctacgttcctgcctaccctcaccagctgagaccagtgccagagtacttatgcaacacagaccagccacatgaaagattatggtcatacatgtgtcaccatcagatataatccctagatctctcaaatattagatctgagtagaagaaatggagttacccgaatcacacacagagcacaatgactagtaccaacatcgctggctctgcttatgaatatgtacaacataaaatgcttcagatggtgagttggccattgatgctgtgtgtgtagagtttgcatatttattgtatcaaaattacagtcgttttgaaattatacaatgaggtaacacaatgtaatttcttaattactgaaaactagataagaaagtatatgagaaatgacaaaataaattatattcataagaaaactctggagagctacagaatttaaatacagttgattttaaaatgttaatatttgtaaatcccctattgctattcctggtgcaacctaccttagtgttttgaaactttcaagtttacaagtctatacaatagtaaatgtcaggtgccttacagtgggattgcctaatctgtttgttttattcaattcctattgactattttttgataatttattaatcttattgtaaggaaaggattccccagctatattttatagacctgcatttctttctggagtgccttctgccatgataaatgttattcatccttaaatctagaattctgctcatcataaagctttgctagaaaataaacacttaaaaaattagtgctagaattttagaatttaaaattgaacttcaattaataaataattttttataattatctcctgatatattgttgttcaatgtgtatctgtaccattatgtttgagtcaaataagctgggactcagaaacatttatgccattgatagtgttcacccagctaatcataggtatgattgctattaaacagtccaatgctatgattgtgctcttcagcacatttcacattgtagttggcaagtttacatttaatagtgtggattccttggacaggcttaggaagagtagtaagatccactttgattcagggcttggattcattctttgtttggacatgattgactgaccatccacatgtcaggtatttttcgttggttgtgaaacatgctatttgttacaaagggtattttagaaaaatacttggggtccttcctgcctccatctgtacccagaaggtggggctgttccacagtcctctgtgcactgtttctgccagaggagagcttgactccaggaagtgctctgatgcctggactccattttctctctggtgactgtttcaggcaggaccggccaagagcacacaggcctcagaatcagcagagcagctgggacagggtccttcctgcctccatctgcacccagaaggtggggccattccttagccctctgtgcactggtcttgccaggagaaagctggtctcccaggagtgctcacaaaggattacagacccacaggaggaacaagctccagccagagagagcaggaacatctaacacccgagattaccatatggggaaaggcaaatacaagaatcttaccaacagaaaccaagactacttggcatcatcagaacacagtactcccaccacagcaagtcctggataccccaacacgctggaaaagcaagatttgtatttaaaattctatctcatgatgctcatagaggattttaagaaggacataactaacttccttaaaggaataaaggagaacacaggtaaaaaggtagaagcccttaaagaggaagcacaaaaatgccttaaagaattacaggagaacactggtaaacaggtaaaagttcttaaagaggaaacacaaaaatcccttaaagaattgcaggaaaacacaatcaaacaggtgaaagaattgaacaaaaccatccaggatctaaaaatggaagtagaaacaataacaaaatcacaacgggaaaaaactctgcagatagaacacctaggaaagaagttaggagtaattgatgcaagcatcaacaacagaatacaagatatagaagagagaatctggggtgaagaagattccacagaaaacattaacacagcaatcaaagctcccagggagatttggggggtattggttagttcatattgatgttcctcctatggggctgcaaaccccttcagctccctgggtactttctctagctccttcactggggaccctgtgctccatccagtggatgactgtgagcatccacttctgtatttgccaagcactggcagagcctctcaggagaccaatatgccaggctcctctcagcagaatcttgttggcatctgcaatagtgtctgggtaaaacaccaatcaaagaaatcacattgtgggacttgtgtctctagctgcatgtgtagcagaggatggcctagctggccatcaatgagaggagaggcccttggtcttgtgaaggttctatgccccagtacagggaaatgccagacagggtcaggaggcaggagtggtgggttggggagtaggcagtggagggagagaatgggggattttcagaaaggaaactaggaaaggggataacatttgaaatataaataaagaaaatatctaataaataaataaataaacaaacaaacaaacaaacagaagaatacaaattaatccattcttatttccttgtacaaagctcaagtccaagtggatcaaggacctccacataaaaccagatacactgaaactaaaagaagataaagtggggaagagccttgagcacatgggcacagggggaaatttcctgaacagaacaccaatagcttatgctctaagatcaagaattgacaaatgggacctcataaaattgcaaagcttctgtaagacaaacaacactgtcaataagacagaatggcaatcaacacattgggaaaagatctttaccaatacttcatccaatagagggctaatattcaatatatgcaaacaattcaagaagttagactccagagaaccaaataaccctgttaaaaatgggtacagagctcaacaaagaattctcaactgcgtaatagtgaatcgttgtgaagcacctaaagaaatgttcaacattcttagtcatcagggaaatgcaaatcaaaacgaccctgagtttcaacctcacactagtcaaaattgttaagataaaaaactcaggtgacagcagatgctggagaggttgtggagaaagaggaaaactccttcattgctggtggaattgcaagttggtagtaccactctggaaatcagtttggtagttcctcagaaaattatacatagtactacctaaggacccaacaataccactcctggacatatacccagaagatgctccaacatgtaattgggccacatgctccactatgtttataacagccttatttataatagccagaagccggcaagaactcagatgtccctcaacagagaaatagagaaaatgtgagctgggcgtggtggtgcatgcctttaatgccagcactccggaggaggcaaaggcaggtggatttctaagttccaggccagcctggtctacagagtgagttccaggacaggcagggatatacagagaaaccctgtctcaaaaaaaagaaaaaaaaaaaaaaaaaaaagaaaaagaaaaagaaaagaaaaaaaacggaaggaaggaaggaagaaaaaaatgtggtacatttacacaatggagtactactcagccattaaaaacaattaatttatgaacttcttaggcaaatggatggatctggatgataccatcctgagcaaggtaacccaatcacaaaagaactcacttgatatgcattcaatgaagctcagaatcccaaagatacaattctcgaaccacgtgaaactcaagaaggaagaccaaagtgtggatacttagttccttcttaaaagggggaacaaaatacccatggaaggagttccaaagacaaagtgtgtagcagagactgagggaatgaccatccagagactgccccacttaggcattcatcccatatacaatcaccaaacccagacactattgtggatacaacaaatgcttgctgacaggaacctcatatagctgtctcctgaaaggctctgccagtgcctgccaaatacagaggtggatgctcacagccatccattggactgagtacaggatccccaatgaaggagctagagaacagacccaaggagctgaaggggttttcagccccataggaggaacaacaatatgaaccaaccagtacccaagagctccccgggtctaaactaccaaccaaagagtacaggtggtgggactcacggctctggctgcatatgtagcagaggatggcctagtcagacatcaatcggaggagaggcccttggtcctgtaaaggctcaatgccccagtgtagcagaatgccaggaccaggaagcagagtgagtgtgttggtgagtagggagcgaggggggacgtggatagggggttttcagagggaaaaccaggaaaggggataacatttcaattgtaaataaagaaaatatttaataaaaaaagaataaaaagaataatacttggttattacttgcagatacaagactgttgtttaggaatgttcaggtggttagagcgaagcttcaggaaaaagtgcagcggttgttcttgagaaaatatgtgtttctggagttggtgaatctgctctaaattccttgccggtggcacacacttcttcaaaccttagcataatcacttgagtttagtccccataatgcacattggtgtgccatccgcttgtgattctagtgctgtcgttgaagccctgtgagttcctgtgtgaaaagctagcctctgaggagcctccctcgtttgacctctatcctctatacacaagcacacatgcacacacacacacacacacacacacacacacacacacacatgtcccatttacatgtgatttggttaaaagttaaactttgtataccaaattcccatcttaggaaagatgtaccttaaaatgtgatttatccaatataagaacatatgggtgtcaactttcagactcttaattctaagctatgaagtatattttatgcatatcatatttcagaacctatttcatattttattcaacatcaactacatcaactttcaaaagttgatttaagatgtgtattagcgttcccatttgtttgaaaaaagagtatataaaaatttcctactttagcgtgagatttgtctgtactgttttgattcactttaaatgattattattaaaagaaggcaattatcttataatttcctttttataatcaatctttcctaataaattgattttcctagtggcatctgcctctctatatatttcagcattctgccactcactgttccctgggtatatttgtgcatggagacacatgagcttgattgaatgtgtggccatagaacacgttgccttggtgggtgatgaagaacaatacactcttcagattccctggtgcctaacctgattgtggagtatggagtgaagtacagatcagttagactgaagttggtagagtgctgagtacccaaagcacatgctagaatacttaacattgtttcattttcaggggagatagcagaaatgaggtctcttacatccatgctggccttgaatacactatgtagccaagggtgagtttaaggttctggtcctaatgcctttaccttcacggtgaccttacaggtaaaccccaacacacctgttttagggactgctggacatgctaacacactctctaagctattctactaagccaactcccatcctttgtcattttctggagcatgatagggaacagagtagtgaatgatgggattgtattttagccttattagtccatggaattttatctttatcatttaagatacatgcacagagagatgatgagcaaggcatccacggtgtaatatgtactcagcaacatttaatgtggactctgcctctaaattgtctgtttgctcctgccatggattgggcttctgccctgcctgaggactttccactggtaagcctcatgagctacttctcttgagaaatcagcttctcctgtttatctttcaaggtgcaatatgagaccattctttaaggaagacgttcttaatgcctctctatcagcattccctttctatctataacagttcttttttcctttgtagtattgatgacactttgaatcaaactgtatagggacaccactgggaaatataagtgatatattttggtattaagtctagctaacatgcatggtgatatgtgctataggtgtaactctgttggagattgtgactcttctttctttggaggaaattttacatatgtagaagggcttgcttctttgggtttaaaaataatcttatcaaaatggaattgagaatgtttgctaaaagtgttttaagactttgaccctacttatgaacttgtgtgtatttctgtgacaaggtttgtctatttctgtgtagatattataccgattaagaatattttcctatgtaattgtacatgcaacaatgcagagagaacttgagatagacaagaaataggtagactgttatttcgtttctcttcattataactacaattctgaggaagatttcaggaagacatgggatgactaggagtccgacttcatgtaaatgtattggataaggcagagtgcatttggcatacactggttttcatgagtatgtagaggactgtgaaatcacatattgtgaagggagacagggaagatgaattcaatgccaggcaagacttgaattgacttcaagaaatcaagctacattcagggaattaatctgttcagtttcactgaggaagagaaagaagaagagcgtggcctctgaactctatgtgctaaactatatttagtccctatgttagtaaaggcttagtaaattattcaggaagattatggctcctcttcccctggagatactatgtaagtacaccgaagctcttatctgctctgttttgacaatgatcttgccctggcagagcaattgccattttaaataacccgtcaagaactcttccacttaactgatgctgtaccatacatgcttgtgctgttactactgttgatgctgctgctgctgctgttgttgatactatcatgtgcttctggtgtgctacaggttttataagttatatttttccttgaaaagcctagagaaattattgtgatttgttgtggtactcactctacaagataaaattaagtactgagaactcacattaactgaatcaggactagttttttaatctcttaatacttttcaatgtgtgttctgccaagaaagcaatatacatttttttatgaaaatacaccccatagtattggatgcaattatttttgcatgttctcttcattctttttaacaaaatcctctgcagtcaatccaatgtactagtaccaaaagacagaggttaacatcattaaaataaaatatacaataaagcctgagcaggtggcttggtgggtaaggtgtttaaagaacaagcatgaaaatcagatgtcatgtaaatttcagtacagtgatatatatctgtaattgtaatgaaatgagaattaataactggaaaattcttggaagtttacatgccagccagcttgccacagcagtgctgaacaacaagaactcctgtcaaggctggaggcagagatgaaaacctgacattgtcctctgatctctacagacatactgtgtcatacccttcacccaaagatttcagaatatatactaagaattctctaaagtatgagtagtacgctacagttccatttctaaaagtcttatgtgctgagcaaatatttctcgcagccagatgtctgattcatcaagatttatttcaccattcatgtgcagagatagtgagagaacagagctaacattagaggaataaatttattaaagctgtaaaacttttaccaacaccttccccctccgtcttcacaggtgaaattgagcatccattcagtcgtaagtcatttatagccatcctccctgtgtatgagatatcatgctggattctggggatatataaatggaaatgaagttagaggtactcatagtccacaaagaggaatgggaatataaaccgatagtttaaaaaatataagatctgtgatacattatcagaacatattcgctgtctgagtgaggagttgtgggtgcacagggcccttgatttaagtggcattaaaggttggtaaggaaagttagccaggggcacgagtatgtgatagagcatccgtcttaatattagaagaaatatcaaggaatgtatcttggggatggagactccatgtggccatgagtggctgtatgtggaagaaaaggaaagcagttttgcaaaaagataataaagtaaactgagccttcatctctgaggaatttgtgcactttgctatggaattttcctggggataggttcgtcgccattttactatttaatagtgggataagggatactttaatggaacttagaaaacacaatcccagggctggaggaagagctcagcaggagcagctttctgttctaagcctgacgacctgaattcaatctctggtacctaaaagacagacagagaaaaacaacttccacacaatgtcctctgaccacccgcacacacccacataaatacccagaaacacacacaaaacagatagagtcttaattttttaaaaatgaaatagaactataaatacgttctgtcctgtgtaccattgggaatgtgacatcataataatttttgtgtagccttaggggaactactgacagacagaaaaattctactctggtctttctcttttatctttctaacctatcaagtagtaactcagaattataggccgatgaaaatgatctcaagcaagtctttggtggctggcagttctgagcatctatacctaatgtgaacccagaaaggagatatttcagggcaaaattctttttgtgacctgtcaggattggcaactatatcttcctcggaggctaaaaggttaattattttcatctaaagacctttcctctgtttggttgtactccagaatacatgatttttttttcatgttttattgaaacattggatatgttttctgatctttttctcttctttctttctttcttttttttttcctaaaagatctaaaaggccttatgttaacacggcaataattatttaatttctgcagtgatcccctactttaagaaatcattccagtcctcaaaataagctgcagtggtattgtggtcatggctttaaggatttagactgggtcataaatcaaatataatgccaatacagtacagtttggatgagacacttgaaattactccgatggtctttaaagatttggtcaggagtaaaagcatatgttgatctcattcttcttttaaaacctgcatgaacccgactgctgttctctttcagcataggaaaagaatcatttattcactacttgctcttttctgaggatgatgatcatattcacagtttatattatgtccttcagcactgacttgagatcaaatagtattatgcttgactcttggctgttctcaggtgaatagaatgtctgtattgacattcatgttttatttaatgttttcaatatgccaacactacctcttgcacacatggctgtgttcctcatatattgaatagactgcatataacccgaatcagtagtccaggttctcgatataaaaatgtgaggtgcctttcaccctcccatctattccttatatcttcaagagcagaactgacaagcgttgcttccacattagccaatggcgtatgatgtggacagtgttcattgatttaggcatatttccagtaatgccttctagtttttagtgcatggcaggtatcattaatttctttccagtggcaattccaaaccactcagtgataatatggacataattttaggaaaattaatttgacgtgtcttgtttttattctttcttcttttggtaactaaagtgattagtttcatggttaaaaacatcctccccctttttttgtaagccttgcttggtttgctctatgggtcactgaggttcctttagatatgaaaaggacttaagcaggtgtatgcaaatagttcattgttgactgtgaacagatatctagagatcgccaacacattaaatctaagtttaatacttaaactgaccttccttcctttcttccttttttatttatttctctattctttgattgccatttatcatggacaaaagacattacattttaacactgtatgatagttcacaatattaaggttatgttcagtatgacaaggaccgtcctatgcttgtcactgcaggttttatgaacacatcttttggagacattgacacacctttaattatgactccttatcgcaacaaagcagtaatcatttaaatagcacatctgatataggtaaacagcacacagcttcaaaataaagtagacgagaccactggaacatcagatgttagctactatgtatagtgagtaacattaaatattaagatttatcttccttctcagtctcctggaacatgtaggaaagggcacaaacgggatctttacttagaaacttgatatgactgcatttaagctcaggtgcttaagctcaccaccaccattgtaaaataaatgtttgtcttggcacagagtcatcattgacaccttcacattttgtgctaagcaattttttttatctcatcctgtgtgataggaagtaaatatttgtgggacagttccagcgttttggaggtggaacatttcgggggggggtgttatggggattttattgcatttattgacattggaattgcattcttgtgaaactgaatgtgatattctctgggtaccattctcctcctgtgtaaagtcaagagggaaagtatttaccttttagtgactgtttcagcttaggagcatttgcaggagctagctgctcctactgtctcctccttacaggtactttggatcactaattcacctcatcagcttaacctgacacggaagaagcaggaatatcaagggtagagttactctcaaagcaagtgatgcctaagtgatattgacactttgacacaaacagttgagaagtaagtgtgtgtgtgtgtgtgtgtgtgtgtgtgtgtgtgtgtgtgtgtgtgtgtgtgtgtcctagagagagacacagagacagagagacagagagagattttgctaattagctctttgctttgctctcggcctggtggccttgtgacataataaagcagaggagaaatcactttcagactcatgtgaaattaaaagaaaattgcaaggatgaatctgttgaataaaaaggaattggatgtgtaaaagagaaaaatccaggcctcctggagcccattgcaaggcattagcccatggagcatgctgctgccttgctcagtgggaggtgacattgcaattatgtttctcagtatgagtcctgcctgcccaatggcatagggccacattgatggaatcagggtgtccactgcactgaaatatcttcatgccttcaaattatttcagattattgtgattttagacaagtattttattatatttttaaaagaagtatggtgcaatagtatgcttatacatggaaacatgtattattaatgactgtcatttttataattctaataaaataatttgtcattcttttatacattttaataaaataattggtcaatctcttatctataatagaagagagggccttgctatatcaccttggttggcctggaacttattctgtagatcaggctggccttgaacacacagagtcgatctgaataagacatgtccctgacataccctgctatagttatattcttaattcaatatgaattatggttgaagaaattgaatgaatactgtttatctctctgcaattttataaggtatatccagaggacttgttaagctttctaccttaaaaatttttttcaaaatattttgaaagtatatatttcttcctttgtcgatgagtcatagttatcaattacgtttttcctttaggaaaatcatgcaaaaatatatcctcaagacatagaaaagaaaacctaaggagaaacccagctcttctgcacttcatttttatgatttatttgggtctcttcaatttgcaacaatttgtttttttcttaaaacatagaaaatacattggcaacacattaataatccttgttgttaaggtaaataaggttatttatccaagcacattactagctgtctggatatattttagccttttttccatacaaatcttcaatacatttccatcattcagaaaattacaactaagtggacaatttaggggtttggagttgttttatttgtagcccgtgctggccttgaacctcatgtgaccctcctttctcagcattcctagggttaaagagtacagctcttgagccaccatgcttgccacataagctggatattttttaaattaaatccagtttcaaagaacatacattaccctgtgctgtgtactcatatttttgtctgtttggtttcctttttatattttcagaatgcattccacaatattcctgcaaaagcattaaagaatatcaaaataatataatataagtaactgtagtttgatcttgacattcggtgcctggaatgtccttgagctcccactcttaaaagacaaataaacaacaaaaacttttatacaattctccccaaagctttatattcaaaacaggaattcttgaaatagtccccattaacatttaatgacatattggaagtttcagtggtggagagaaagacggtttgcattcatgtatgaagataagtaggcatgcccaggggatttggcattgtagaaaagctttgtgattagaaggaattatcttttcttttgtaaagttttctacttgttgggtggctgttagacttttagcagtttttatttccacttgggtgtttctcctagcatccctatgtgtccatagttttctacattttttaaagaccttggatggtgaaaataatccagaaaattttatcttcaaaaagaaaaaaaaaaaccagcaaattgagtatgagaatataatattttttgtcttaatgttgtgtaaaaggtgattaaatatcattgggtgacacatcctagaagttaggacaagaacagaacagtacacaaatcttcccaagtccttcaaggtatccaggctcaccagatgctgtgcctctcctccagaaagcatgatacaacagagccaatgacagcatctcatcaccatgtccgtggctcactttctgagcactttatgtgtagccagttatatttgttcttattgtgatttcatgaatttcatacttgttttgaagcccatttcctggctttggcaatgttggatacggacgtaaagcaactgccagttatgttatatgcaaactgattcctaagctatcctctaactcactgtgtgtttgggctgcacaggcaagagggcaagttttttgttttgtttttgttttaaccagtgaagatctttgacaaccagcatcactaccctagttattttaggatatatgtaatatgtactaacacataaaagtgaggacacttgtactgtgccacaatcataagcaggctggtaaaacctacatgcaacaaccaatgggaaatgaccccaggagtaagagagcttgattgacagtaaactcctggtaaacagtaatgatgcaggctccaattagagaactaacttttaagtctctgtgccaaagaaaaagaaatttaatgtgcatttaatggcaccatctgttctacaatgtgacctaaaaaccaattgtttataaattaagctcagtttatgtagaacatctcatttctgagctagattatcaagtaatctaagatagcaattcttcccatattctgaacgtaccatccactgacttccagcactttttctttctaccttgaagaagtcgattttgataagtattatgttcatatccctatgatttcctgatacttcctttaaagggaaaattgcttcaagttgttatgttgactggtttcttgttctggtgaatcttattttctcactgataattaaaaatgaaaatacttgaaggttaaaacaaaaacaaaaaacaaaaggctgttcataacatgtgccatgaggaagtgtctaaactcttttcaaatgcccatcttaagtgtatccttcttcctttcctttgttttccaccgttgtttctagtgggggacaggggtgcccagccagtcctttcctgccaatctgtgtctcccaggagcttaccatcttgttgctcaccttggaatcttcatcctgcttctcagccccatattgactgctctaagaaaatggcctctcaggttttttcatcccataactaaattcagatatagtttttataggtagtttttaatgttagtaagaaaaacatccaaacagcaaacattgggaatctcatgtttcaggaacttgctggtagccaaaagtcatgcattccttcagccaagtgttttccagcccaaggcatggtggttcaggggatacaaatgatgaacataagtaagtaaaaagtgtatgattttagatggtaaaaactccacaggagaagaaaaaaaaccataaaggtaaatggataatggattttaaacaaggtggtcaagaaaaccaccttcatcagagaggcatttgaatgtcgtcctgacaactgagtcaagtggatagtagaatactttccaggcagagaagtgcaagattgaatgccctgctttaggcaagagaggagtctgttatgttcacacagtgtgagcaaaagtcagacctgaggagaaaggccaccatcactatgtgtggggtggaagggagcccgaagactcttttcccctggcttagtaggtagtcactggaggttgtatactccatcgtgatatgatatttctggtatatacaacatcatataaagacccttatctagatacaagatataatttgtttaactgttgaaaaatacttatttttcaaggaaaaaattaaaatggtaattgtaccgtacaggtgggaaagtaaacttttagagttagttgaaaatattagcctcgcctaatagttactaatgtttgttctacattgcatcagaatttaagatactggacatagataatacagcagtgttacattggtttttgaggtaactgtattacgaaacagctttgcttacagatttaataatcagttcattatttattatctttaagataaccatagttactttaaagcaatgttatccttccagtatttcaagagaccatgaatcttcagttttaacatgggctcggatctgccaggtagaagttaaagagttcattattcttctcactgtcaatttcctaatttacaaatgagctgaagcaattaatgcttgcaggttgcctgtattaattacagtctcaagcagatttgtgagcaattttgcaattctttttgtcacattttctctgtgtttactatctcagattgatgcttgttgacacactgattcatgttttggtgagctagataagttttattcatctggaggaatgagtataaagaggtcagatcctataaacaagcgaacgtttctagtgtgtgcaggccatatatctagttttaatttaatctttgaaaatgtcgagggatttctgcagctaagctgtacaaatcgataaaatttataatcaaggctgtctaatctctaaacctaatataaaacctcacagctattgattatttgtgaaggatccgcaagctgttaatcatgcatgaaagcgcagaataaatggcggcttcagaaaaggaaatggactaggaatcactggctccatagcccttatctttcttctagcaccccgaagcaagcacgcagccaggcatttgtgttttatgaaatcaagctgtgtgctaaagtgcttcaacggctgtgatcacctttgaagtttcttgtccactctagcttttttgtataataactcagaagtctcttttccccagatatgggattggtgcagtccagtgtctttgatcaatttctagaaggagtggaagaatagtgcgttgtatgctaagcccaccattatgctgaagggcaaaatgggatgtcactttttttgtggttaattttgggaggagggaagagttccagacagtctgtgccctcagagtactgcatcgttatagcataacacccagccgttgttattgactgatccatttgtgtagtttaccactaaaggagtttggataagaatatgtgcatcactttatcatgtcttgcaggcccagtctttaagtgtaaagatatttggcctctaatgcagattggctgttatagacattatgctttcagatgtacaaatagaatacttttcagagtgccagtgtggagaaggctactgggaagctactgagtcaaagtgtatgttatgccactctcaagtgctatttcttcaacattattagtctttacgggaacaatgaagaaatacacctgccctcaaagagtccctggaaagagagagagaatgaatctgtttctcagtcatatagttttgtttctgcttggttttcttttaagctagggaggtttattagagtttaataaggaaactgcaggtcgggtaaagtgtacatctcagcagatatgaaaccaagaggaatggaaaagagaatggtgaaacaaaatggaaaacaaacaaacatacatacagaaaaaaccaaccaagcaaaaatgcaatgagatttgagttaagccagcaaagatgtcagccacatggagacacacagccactttacaggaggttcacttaaaggaggaatgaagacaagagtgctcaggaaagcatgcttaatgcttagaacagaggttaaaacctatgtaaaaatctatgtttttctgagtaattaaaaaaattaggcagacttcattgctgggacagaattagttcctatgccaggagccagaattgtgaggagaaagttaccttaatttagtaataattattctgcctatctccttcctaggggtaattctgccttcttttaccaagaggcagaggcaactcaaatgtttcatcccctgaaagacatgtttaaaagaatatttcataccacagtgtgtgacacatgtctattacttagtaaatgtttagtactatacaatttattagtagtgaaatgaaattcttaagttattgtgctgtactggtagatctaatcacataatctaattgatttactaaatgcagttagtacatataaatattgtgccacttgccaagtatagatcagacatgtactatagatattggtattcttggttgacccagaaatctgctgaagaatggctggtttgatcttgttggcctttgctgatatagctattgtggttcatctcagccaactcattctagaactgtggtgctcaaccgtgctaatgttgtgaccctttaatacagtttcttatgttgtgacctccaaccataattttattgcactgctacttcataactgtaattttgctacttttatgaataattatgtaaatatctatgtttttcaatggttttaggtcacccatgtgaaagtgtcatttcaccctccccaaggagccacaacccacatgttgagaatcactgttctaggtgtgtgagcaaacaggggagtaggagtttgatgagatactccataaagccagcgtactctccttttttctcatcttggtaaccgaagtaggtcataggagaccaggctaactccaaaagatggagaaatagagccatttctgcttaggggagaacctgataggtgactggaaatttgggaatccagtgaagaggaattggagtcatcttgtagttcttacaaggagaatatctgttgtaagcattattctctttacttattgaagtaaaaatgtacataaaatattgttgagttgttatgctgagtgtccaaaatattcccgtcatttttatcagagcatcctatgaaaaagctagtttatctcctgtcagtgataacaagacatacaaaatcctcttttaaaattgttcaaaggcatttacacctaatttgtatcatctcatataagtggttgtactatgtattaaaatgttctgttataaagtttgtttcttaagggtttcaaaacttgctattttgttgtttgtcctaatgctaaatattttatgggaaaaattaagattgtttctaaactaatagttgatattattttctttgaatctttcttttatatttttcttcaaatatacactgttacctataggaattggtttaaagttttatttaataacatgtgtgatagacaatgtaagatagcttagtatacatatttcttgagttctgttgcatggtctcacacactgtaacatcaaagatgtaaaagaaacacagctaagggtttctatagtttcagttagccacattttgtaatctgggtctatggaaagatttgaaagaaaatatatttgttggaagagaaagacattgtcttttgctttttaattcatgcccatcttcttttaaaaaaaaaagaaaaagtcaaactgttcacttagtattattagaaggaggaccctaatatgtacagtatctgataggttccagcaaggctctggagaccagtgagaatggcttgtctcttaatgggatgatatgctgagtatggctttgatggcacctggtaaatatgactgggactcagcaggatggctgagtgagccagacaccctctgtcactgtgtatcccttgagtctaagcatgtcacttcaaccactcagccagaaatcaaaagaactgacagtagctttgtgattattcctggtcctgaggctccctcatgttacaacactaatcaagtcatcccctcaacttgccattgacgcaacttgacctgtgggagcagagatgaaattatttgggcatgcctaatgatgctgtaacattgaaaagacaggaaatataaacccttgatcacgctcagttcttaccatgagaataagaacagaaacacagagatttgcagtaagaatagaaagtgccttctttcaatgtcacagtttcttttcccaaagcacagctctatttttttcttttttatttattttttaatttacttgtgttccaaaattccatcttgctcctattttggttcacagtggcaaatatctcctctgacagaaaattcactttccttgtatgtgtttttataaatggaatagaaattgtgttttgcagtgagcctctaagatttcagatgaaaagacagccaggagcaagcagctccttccacgcttcagtgttcctagtctgtgtacatcattgacaagatcttccttttttttttctcctcatgtgctttgggatatcttctatttttctctgactgacaggtggatagaaagttttatcattaaaaactgattctagaaaaacaggattcctgtcctctgatctcttatggttgctaaagctctgttttcataacctcttcagaataactggagattatcactacaaagggatataaatattgacctgtctttctcatattgtttagcaagtaccaaaaagagaaagaaagaaaggaaggaaggaaggaaggaaggaaggaaggaaggaaggaaggaagaaggaaggaacgaaggaaggaaggaaggaaggaaggaaggaaggaaggaaggaaggaaggaggaaggaagnnnnnnnnnnnnnnnnnnnnnnnnnnnnnnnnnnnnnnnnnnnnnnnnnnnnnnnnnnnnnnnnnnnnnnnnnnnngaggaaggaaggaaggaagaaggaaggaaggaaagcaggaaggaagaaaagaaggaagaaagaaagagaaaaaagaaagaaagaaagaaagaaagaaagaaagaaagaaagaaagaaagaaagaaagaaagaaagaaagagaaaggaaattattttattgatgctagacagtatttttgctatagaacagcggctcaatgtgtcagcaggtcccctcagtaaatgtggccttttttccccaacaatttgagaagaatcaaaatagttcttcgttttatacgatcaaattgaactcgactttctgcacatgtaaatccctgctttgatttgtttaaaactaaagtagatacaatgaagaatgatctgtttgcctatgtgctaattatataatactggctgtaacctgatacagtttttgccactttattattattttagatataatattgcctttcttgctttaattgctaagaaataaatggacaacaaattctagaaaggatagagaaaattgtaaattttgctaatcaatatttagccagctagctggagcctctaattctgacatttcttcctgcattaagaaatattatagagtagcaggatggtttagctagtactgaccgttgtttatcaagacaacttgagtttggactcaattttgatcccagtgtcccttgtgatggacagagataattcccacacgtttgcctcactctttttttacatgcattgtggcacatgtatgcagatgcatgtactaaaaagggaaatggaaaaacttaatagtacagagatctacttgaattcataggaaaggaaagaagaataaaggtgtctgcctgtctgtttgtatgtgttgtctctgttaagagtgctcgtaattcccctgataaaggttaagcttcagaaagactggactttgcatttttttttcctgttcttttgtttactctgcttccagcactgttcatgacacaccaaagtccatgcactcctaggctttctctactcctctttgagttctaagggaacagtgtctatccagacttacctgttagctgacagtgttggagggatatgttcagtgaacagtgattgtgagaagcagttaatattgagcatgggctgttttttttaccacctcagtgagagaaggcctgatttactaatctccaacctcaggttaaaccactgtttttctctgatgttatatgaaatgaagaagctatactgagagaactgctggtggagctcagggatagattttttttctaggtatgttttgggccttgagtttgatgcttagcacccccccccaaaaaaaaaaaatggaaggaaggaagccacttggatggattctaagtagataaattcattcccctaagctgaattcttacttgttattagaccatcattctcttttaagatgcaagcatgtgcgcgtgcacacacacacacacacacacacacacacacacacacacacacgctcacaacatggtatagggagatacatagctattattttcttacagcaataattgtagagatgtggaacaagaccgtatttgttacaaaaatagattatcaagtcttcaaactatagaaacaaactgtgcaattaacaaaccccaaggcccagttaatagaagaaaacatcttatgtgactttagaaacaaaagtaggctttctcttactattctgacacccctttgactctcctctagttgaagttttatacacacaaacacacatagacagagacagacagacagacagacagacagccatgtacatgtacactttctggaagctgttctcttaatctaatgataaatatcctaacattttacatagacaaataatatagctccgggttgttgttttttttcccccgtatgtgaaaatgaatctgagtttgtagtacttggatgtacgtatttggctgtatttgatttgtccatttcggtttagaatacacagcagattcacagaatgtcttaagtcttaggagccatggatggagtatgatggagtgcaatttgtttcactaatttgggcctcaatttaaaaaaaaattaacaaaaataacaaaccagtattctccagtctgggcaatatcagtgaaacatgatattaattttggaggagctaaggttttaaagacaatagaaaacattgtccaagcattaatatcttttgaaataaagatctggctacatggttagattgctcctgaatctataaggagttgagctcaggcctgaggaacacaggcaaggattttagcctgggatgtttcctaggaagatcacatcgggatgagcagaataccaccacagaataaagatctcgtgtctgatgtgacctctgctgtttgtctagtgggactctagcaaagtttaattgtttagaaaagaattcagcatgggttgaaaatatattctagatattagtgaactttcttaaactctttcttgaatgaatatgtagttataaataggtactgctctctccctttctaagtccgtggcccttctcattttctctagcacactattgtaatatctctgttgtgtttctctctgtccctcacagtcttcccccatttaccctgaaccttctctttccgctttatccactccctctctgtcttttaccttcgtcctcggactctgaagggatgcacacacccctttcctttatgaaggtaggccaacgcctctgttcagatcttttgttcagaatgcctccccgttatttaaaacacaaattgcttcaagtattgcttctatgctatacttcctaaaacataagtttgttcaattattgcttgtttgccttagttcctaaattaggatatggctaaatatatcttcaccttcctcgttccttgtacacttcatggttaacaaagcatggttcatgatattgaatcactatatcattttacctcttaatcacactgtcttgatttttttcctccaagagcaccatattttctaagacattctgtctgagcacgatagttatataatacctatttatgtacttgaatccaaatagtcacctagttttttcagttgtttccttctatgtcgtatctcatctgcctgtctctgatgtctcttcttattcagccccgatgatatccttacatactgcagcaattgtatttccgtatcccaatgtctctacatctgatgcaacctccaactttatctctccacgtttgtttcattgactctattgactttagaaattagtcaagaaatttaattcaagttcatctcagactcctagcacagcaacaaaatttgctccgtgttagtccaaccagtcttagctacattttatccagctgggtatttgtaaagcaatcaaacgggaatatgtagttttctattttgcaattactttccgcatttctttccagtttatttcctttgattttgtattatttatctaaaatatgaggactctgtcttctgagacctaatgcacgtgtctcctctgtttgacaagcagaacgtatcagtctctcttgggttcagagatactgccgtgttccgctcatgtctccttaatcaagataacaatctttttcttgttttatcatcttcaataaataagaggtaagctcctcaggcctaacactatgttttattcatttttataccttctgtgccattttgcataccttcataagagtccatttttgtttcgcattagatgaataacttgaaggcctttttatgtgaccatttgctgcattaagagcgccacattattgtccttaaggaaactaaggttctgataacactttgctgagcaactccttccacttcctgtctcgcctatatctacatgaacatgagaaggggttcccagccagcacggactatctagcaagacagaaacaaaaaaatgtaaaattatatttaaatctctatttaacaagtacagggtaactgattaatttattcaatctatgggagcaaaaaagcaatgaaagtaacctactgactttgttgaaagattcttcatcaaaaattcttttcttaatcaaatattgacacagaaattctggtggtgacatacatgtacataggactaattatgtatttaagtttcatatgtaattcacgatgaatgccaagcaagcaacattcaaatacacacaaaccaaattatccaagtgtaccagtgaatttgtacttagtaaggtattgtcctattttggtttttgtcactgtgattgaaaagaaaaaacttggataggaaagggtttattatttcttacaattagactccattatcatggcaatccatggcaaaagctgaagcagaatcctagagtcagcacccggggcaagtctatggaggtataatgtttgcctcttgctccccacaacggtccaatctgctttagtgtacaacccaggacctcctgctcaggggcagcacagctctagcaggctgggtcctcctgtatcaataagcatcaagaaaatggctcacaccctcacccacatgccagtctgataaaggtaattcttcagttgcaactccctcttctcagatccttctacacttgacaaaagttaaccaggacagcaacttctctgtcctctgctaagtctgagctatgtgagtgagaacttggggtgcacataaggcacttccctctttcatggtgtataagatattagactgtggaatagctgccagctgcacagaggggaaatggagatatggagaaagaagatgacttggatccagacaaatgcgtagaaagaggaagcatcactaagcaggagattttttaccaatggtggtttttgtcattgatgtctagggggtcactcatttaaatattttaggtgttttcttacttcctcattctggatttgaataaaaactttatagacaaagtatgattcaagttgactatggccactaagaaaagtcctgttgctctctagccatagtgaaaattacagtttctctagcaatggatagagttaatgtagctgttattatttagtcagctgctagattccagagacaaagactgatggaaattgccacttcaccacagggatcatgcagtggggaaagtattagcatagagttaaatgtgagaacacctgtatgattacaaagccatgaccctcctctcagtctctctgtgtgctcttaggacagtaaacaagatcagatctcctacaacaggcagactaaggtctgaagagcagccactaacatttgaaacctaagcattagattctaccagggtttgatttgtatatgtacacggggaatatttagttttgcaattttaaactatcatccacttaggattctttcccatcccacactagagccattaaactggattcccaattcaggcttaccatctgtgttacattctaattatttttataaagctgagatttttaacatcaaatacaaaaatgtataaaaacatccaaagtgggccctttgcatttgttttgcttttatccttgctgatttcagtttgttgttgtcagcaatgctatcgaccatcctgagtgggttaaagaaggcaccaggaagaccttgagcttggcctcagcttttttactttagtctactcgatgtcttaacattttcctgtgttctggtttcggtgctgtgtatggttcaccgtggccctgacttccatagagtaattattttgattaagttagacaattaaagtcagtcttgcatgaggagcggatgccgctgggagtcagtgatggatgggctccagttttctaagtgttcagtcatgccagcattttccagctgagtgaaatccccctcctcgtttggttaggacgacagcaaatgggttgttagacctgattgtttcccatcccacttagaaaataagtcacaaagagatcaagaaggcaagaagatggtgttactatctacatgtgttcttgtaatttttctacgtcttttatttgtgttgatgaacagcatcattactgaaataattagtgttaattaatagctgtgtcatttttggttaatggtagtttagttttacaattagactaattagtacacaccatagcttagtgacatgacaaatcactgagcagagcacattgactcttgtcccttctgatgtatgagctaatctactcacttaataatgatgaaggaaagcgacagggagctgtgcaatgacagccatcaggcattgtttccacatttctgggtctctatttgctgcttagttcccgagtacgaggaattgttggtttttgatgttttcgttcttttcttactcttgtgtcatggttgttgtctctagaactaaagtaggaagtctctaaagcttaccaaaattaaactacgaataggtataacactaaaacctaaagattctcttggcaaaacactcaaaagcaaagattctcctgatattcactgcatttgcgtatgctgttttccattcagtgttacacacttccaaaagcattcacagtcaagttgacatctgtctgcaactttgatttattttgcagaacctatgcggacaccaaagactttaaagattgctgaaatccaggcaaggcgcattgcagtggactgggagtccttgggctacaacatcactcgttgccacactttcaacgtcactatctgctaccattacttccgtggccacaatgagagcagggcagactgcttggacatggaccccaaagcccctcagcatgttgtgaaccatctgccaccttacacaaatgtcagcctcaagatgatcctaaccaacccagagggaaggaaggagagcgaagagacaatcatccaaactgatgaagatggtaagctcaagtttattatcttcacaggggtggggcggggaggacaaaggatgctgtcatttctgtacacttaccctgtggtatccatcactgaaccaaacccagaaacccaccaaaatttctcagcccagtttaactctaacagaacacatgttctttagaaaagaaaccgaataggaaatgacatgcagccatgctgtgttttttaaacagtgatgaataaagtctgaataaagctcttcttaccaaaggttaaaaacaaaaaagttattatccatgtcactgtatcagttatcttttggctaactcacattcttacacattgtgtgtgcattttgtaaaaccatactagctaaaattgttttcctaatacttgaagataaaatactccatctggttgcaagtgggtatgtggggggggggggtgaaacgcaaaagcacaggacatatttttagtcaatttttttagttattttcctaaggaaataacaggctatcacttttatagatcttattataatctcagaaattatgttcataaaaattaggtaatagtaatgtatatttatattagtattatatgtctttttcttaatggtttggtaaatcattaacatggctataaatagagttccctattttactaacaaatattttaaggtgatactttttatgatatttcttcctcaagtgaatctatgttcaatgaaagctattatataaagatctgaagcaaagattaccagaaatccacctcttccatagccagtaacttctcccagctctctagtcctgtgcttacgtgaagaagtcaagtctggggatttctctgcttccattctttcttactttctccttgaagaggctgataggagtttcagaacaaaagatctattttatagccagacacctcccccacctcccttcatgtattcaatgggccactaagtatcttttggtacctagcaagtagaatccaggtggctgtcataaaataggtctgtaagctgtagtttctagaaacagtcctttcaagttttctcctctggaaactggaagtgactttggtccatcctgttgctttgtctttagagaagcaagagccttggatatcaaactggccgcaacacagtgtctaaagtcagtctcatattacaaaaacttcagagtaaaaactctgagacttatgatgaatgcttgagttaatcaaggtggccatctcaagtattacattgtttcatgtcttgaaatcattgtggtcaaaatatttaaataatacctcatccccatcttgtctgctgcccctaccctccgacacacttaacacctacctgtgtgaaaaggaagaggtgaggtaatgagttcataggtcactaatagaaccagatgtgtaagaagagctacagctgtcctgaggaatcacactgtaccttctgatgtgctatggagatttcagggtctgtgtcacactgggcattttataacccatggttttagtattaagagcatagccacatgttttattgcttggtgttaacatttaaagccaggatgtcttaattgataacatttagattaagctacatgggttttatactgtcatttgtttttctccactccccctttaacagtgcaatttcccttgattttatcctttgatacactttactatcttaattttctttcctacaaacaaaagaaggcagtcaggttttgtaattttcttaattacattattttcttaactgcgtttggttacacagatgactatgttaatatgcagataatggaatgctctggaattttgccctaacccatacaaatacacaacgataatgttcatattgtctagaatcagtttatagatgaattctctgtttaatttcagtcctattttcaggtcgacatttattttaacctgtgtgttgagaaccctttgtagacgcttccgttttcctacactgcagtttagtttgctatattgacatcagttatgtgaaggcgaccattagggttccacagtgtgatgactgcatgacccctgtgattgtatctcatgtggtaggctttttcctttttcttgtttgttttctgctgtttaagtaatacttaatgcccgatataggaactttcatgatgtatttgcgagtaactcaccctccacgactgttcctgtgagtttgagtttcttcacaggataatcgatctatctcgatgttcagtggtaaggaagaacaaccaaatcatacttattgttgcaaagatcaatgaattatgatgatctgattaagtcagttttacttaattattgctgctccaaatacagagaaaaaaattatcaaccatctaataaaaaggatatcattatgtgaaaagaattctggggacctccataaatcaaggtcccaaagctgggcccatttcttattagaaccttggggtaaaatttatacttaatttattacacttgcttttttaatgcatgggcaaaattttttgtctaaggttctgttttcatttttcattttagcattcatgaaaatcaatattatgaagttagctcagcagaaaagcctggtttggggacattttttaaggctacaaagctattttaaaatgtacattcattacattttagaggcagcgatgcttatttaatataatctttctccgcacctatttcatttttctttcctttttttctttttcttttttttttatgaagttatatttgaaggacttcctcatgctcaaaacaaaattagctgaaacagctcacagataaatcactactagtaccggaacaaaagtcagcactttgtctccgttcaaaactgctgtggtggaaacatgaagtggtaatccatgcgctgtagctaggcatgaagtggctctatgagcttcatgctgtattgtaactggatggagatagatagatagatagatagatagatagatagatagatagatagatagatagataggtaggtagatagatagatagatagatagatagatagatagatagatagatagatagatagatagatagatagtttgaagtacttattcgtccaagtcatgatcacttgtacagcgtaccttgggcttgctattctctcacattttacatcttgaaaaggaaacctagaaatacttcaaatagaatcatggcaaagtagaacatgtgggagaagggatgaccatagcaatgttgtaggaaaagcaaatttgtatgtccatccatctttcaatgcaaaattatgcaaatagtttaaaccacccctagataaggacaatttgaaaaatcttcattctgtttcatgtaatgtataggccaaattgtgttctgtagacacagaaattgtaatagcagctcttccctttttgttgttttgactcatcctatccatatctgccaagcaagcgccctgacaaatatgggaagaagagatgcattcccctgattgtgatcaaacagattcagcagatatacatatatctccttgcacaacaaaccagtgtccctggcagccttggcattgacaaaaactgcccagaatatctaaaagggtctctgccgtaatgggcaaagtagcctatgctgaccacatcaagcagggtaagggatgctgatagggatgtgagcatgatcacagttcagtgctagcatgctttatggttccagtggatttctttcttttatgtgccacctcatgttgccggccccagaggtcaaaacatcattcatagtctccttgtagaatgaaataaatcttagtctggtgacagatcattcagaatttcttgctgctgctagccatgaagaaatacatttcctttgatccagtgatttttaatttatttcaatcctcatgaaattgctctgtactttgaaatggcatttctagataatgtcatgtgtgaagttcactgaaacattggatttgaggaaaatattaattaaaaaccatacttgcctaatacaaggttgatattttcaaaagggaatttttaggccaagtttgtgggatgataagtattaaagcatcattggaagaagaatctggactgtgtgaataaatactaaggtttgaaagtaaaatatataaaaggaaaacacacaatagtagtcttgtagtttgtcaacaataactgatacatcactaattaataacttgaggttttacaaattataaggctttcacaaataaagaatgggcagtattataattcttgcctggcatgcatgaagctctgaatgaaatccccaacatggtaatggcatcaagcagagtacggtgtcacatccctgtaatctcattctggaggagaagcaaacaatcataggtccaggtcatcctcagttacttcgagcccaaagccaatgcatgcattagaccctgccaaaaataaacagcaacaacaacaaataaaaagaaaataaagactacaataaagtatctgagacatctcagtggtagtgtactgacttgtgtagacaagccctgagccccatcttcagctctgacaaatggctaaagcatacaaattgagagatacttgaatcttaaaccagcttgctcttaataagcctctttcttagctgagaaaaaaagtaagcttcattgagaagcatgaaggaattataatttagcatattcatctttaacatcttttttaaaaattataataatcaatgttatctttttaattatagaaaatttaataagtatagctacaaaagtcaggatgggttttaatgggcatttcaagttagtgctatgagatttggcttttgagtctaaggagcactaattatgattataattcattattttatgaactttgttgatggaacctctttaggggattatcataatcttcaaaaaaatctttcaaggagatgcatctctgttctcaaagcaaattacaaataacctcctgttattggaggtatacaacagagaaaactagagtacatgactatgtaaccctccaaggtgattgaacattcattcgaataaaaataactttacatttattcctacatttcttgcttgagaaacttgcagcctgactttcagtgtgtgtccgttctggagtcaaatctgaatactgctcatgtacggatttttttttttaaagatgtatttattttttattagatattttctttatttacatttcaaatgttatcccctttactagttttccctctaaaagtcccctatcccctcctgcctccctctgctccccaacccacacactcccattcctggtcctggcattcccctataccacggcatacatacaaccttcacaggaccaggggtctctctttccattgatgactggctaggccatcctctgctacatatatagctagatccacaagttccaccatgtgtcttctttgattggtgatttagttccaaggagctctgggggtacttgtcagtaaatattgttgttcctcctatgaggcttcagtacccttcagttccctgagtatttctctgattatttcgttggagaccttgtgctccgaccaaaggatgactgtgagcatccacttctgtatttgttgggccctgacagagcctcgctggagatagctatatcaggctcctgtcagcaggctcttgttggcatctgcctagtgactgggtttggtggttgattatggtgaggatccccaagtgaggcagtctctggatttcctttccttcaggctctgctctgaacttcgtctctgtaactccttccatggatgttttgttctaagaaggaatgaagtatccacactttggtcttccttcttcttgagtttcatgtgttttgcaaattttatcttgggtattctgtttctggtctaatatgcacttatcagtgagtgaatatgtgtgttcttttgtgattgggttacttcactcaggattatatcttccagatccatccatttgcctaagaatttcataaattcactgtttttaatagctgggtagtactctattgtgaaaatgtaccacattttctgaatccattcttttgttgagggatatctgggttctttccagcttctggctattataaataaggctgctatgttcatagtggagcatggtgtgtccttattacaagttggaacattttctggatatatgcccagaagaggtattgctggatcttctggtagtactatgtccaattgtctgaggaaccgccaaactgatttccagagtggttgtatcagcttgcaatcccaccagcaatggaggagtgttcctctttctccacatcctcaccagcatctgctgtcacttgaatttttgatcttagccattctgactgatttgaggtggaatcttacagttgttttgatttgcatttccctggtgattaaggatgttgaacattttttcaggtgcttctcagccatttggtgttcctcagttgagaattctgatattattattattattattattattattattattattattattggtgtttcgagacagggtttctctctatatccctggctgtcctagtattcaccctgtaaaccaggctggccttgaactcagaaaaaaaaatatatatatatatatatgaatacactgtagctctcttcagagaccccagaagagggcatcagataccattccagatggttgtgagccaccatatggttgctgggatttgaactcaggacctctggaagagcagtcagtgctcttaaccgctgagccatctctccagtcccctgatattatttttaaagacacacctgatgctgtctcctttaaattgtgtttatcttgtttatacgatgagtattggacattgtttgtacatgctcttatcaccaatgcttgtgtttctagtgcccgggcctgtgccagtcaaatccctccaaggaacatcctttgaaaacaagatcttcctgaactggaaagagccactggaaccgaatggaattatcactcagtatgaggtatgcaaaagggatgctggttggcagttagtcaccaagaagaggcaaatgggagaaggttaggagggaataatggaacagggaaaggtgaaggtgagaggatcaaaatgtgttttaaagacagcatctctcactgaacctggagctcactagtctagtgagacaaattgtgccacaagtcccaaggatacaggaaccacagatatgggctcctgtgttgggcccattgtgtggagctcaggaaatatgaactccagtccttagttttgcatggccatcactttatatactgttaggtctctgtagcctggaaagcccacactaataggttctactggtggtttccaaacacagtgttacagtcacaatctacggttctcaaagcttctatagcaacccagacagaaaaacataagtaattaaacttaagaagaggtgaagagatattgcacagtagtagaacactgtcctagcatggataaagctcctaattcaatgtccaataccatggtggggaaggggggagcaggaggcgggggaatagatccagtgtacagagaggttgtgatttctttctcatagccacagcttacagatttgaaacccactaagtaagaatagagagacccctgaaccctacattgtatcagaaaaaaactcactcctgaaagtggttctctgatctccaaatacactgtgatgtgagcacacacatgcacataaaataaagatgtaaataggtaaataagtaaatatttaaaaattaaaaaaaaacatcattacccctcctttatcctacataaattatttgatttgaaaattaatcactatacggtatatggaatttcaaaatcttggaatataggctagttttcaagtctatgtatgtgcataaccagactatgtccttgtcaaacccaattaatggttataatgaataattacacgtaaaactgctaagtctgcattcctaaaattaagaaaccattatcacactgtgcttaaggaaaggccactgaatgccagtttttcatagtaagtaattaatagtctcccaaaaggaaaacagattaaaaacctatttcagaatttcattgtacctttgaatataaatcaccatattttcaaatataagacactgaggagaatgatgaatttttaaatgtttttattaaaatagaatttcatacctttccttatcactttcaaatggatatttttaattgcacagttgtgaggtttttctgctgtatagtcagtgctgattatagagtaaacacttctgtttctagtgcctaagaatgaagtttagggatgagaatgttttgactggtaatgtgtttgaattctagttttctatataatttgtttggctttgttgttttgagacaccgtcttactaagttaatacaaatggccataaagtcagtctgttcttgaacttgtatccctctcccaagcagtatagattactaacctgtgttgctaagtattgctagaacttcctatgttccccttaggcaaaaagaagaagaatgtcatacttttgatggagactttcttgttttcatgcatgttaaagtatgtataagaaattttgtatgtagtgtgcatatttaagtatatccatttactggtagaattttaaacatttaagtagttgacaaataagacaaactgatttatattagtagttgcatgataaatgataattaatgataccgatagataatagatagaaagatgataggtgtgtaaagagagatgatagaagatagatgatagtttgatagataacagatagattgatccatagattgacggtagatagatagatagatagatagatagatagatagatagatagatagtaaacgagagatgccagaaataatagcatcaaaattaaaggagcagaaataggaagaaatgatggcttgaagctcttgcatgctatggtatttagaaagagtttatgatgccttcagttggtatataatgggaaatatattttccacaacaggtgagctatagcagcataagatcatttgaccctgctgttccagtggctgggcccccacagactgtatcaaatttatggaatagtacacaccatgtatttatgcatcttcaccctggaaccacctaccagttttttataagagccagcactgtcaaaggctttggaccagcaacagccatcaatgtgaccacaaatatctcaggtaagcaaataagtgatacagaaggtggaaggctcatgctcctggttagacgtaacatactctagacattcagttatatactgtgttcttgtagctcagtaagcctttactctcaatacctgaagtcatggttactttattcagtcatttgagaacaaatcattattggttctatgttgtaatccaaacagtttgcaaacagtcacaaaaatgacggtagtctctttccttaaaaatatctccaagttcataatctatgagagaccttttattgcacctttgagcatcatttgcctgctgtagctggatggatattatttaatgagcagcagatgacttttactctgttattagaatatctcagcccgtgtctgtcccagtttcccctacattctgataattgtaaacaaatgaatcgctcctgttcatgaaaagtgtctcataaatgcatccaattttcagaacaggagcatgaaagagattcttgaattgataagtaaaagtgactaaagtgtaatttctattacattcagctttatcatttcattgtttatagattctagttcttcagtaagctcaccagttaaaccttgttattttccagctgcacatccgtactaccactcctcctaaatgtattctagttagtaaaatactttgtcatattaagattacaaaaaaaaattgtgctatgtgttactaaagagggggttttgaaaattaaatctaagaacatttttattttgtgaattctctttatctttacactaattttacaaagtatatgattgcagcccctcccaattaacattacatatttttgacatagtcttgaatcgttttaagctttatttggaaatgtattgaataaaatagaaattttaaaactttatgtcatgaataaaagtaattctaatatttcatttgcatatgatttgattcatattaatattctagtaaaactgatgttttaaaatatccattgtattaaggaattaaaacatactaaactgtcattttatttcctaaaggatatcaacaattcaaaatatttattaggtttctttgttacaaaataagacatggtgaatatcatgacaaatttcctatcttatagggttagcaactgttgatttttctatagaaattgctgtaacatttacataagcttataaaacagaaagcattgaacaactctatatttctgatttataaatacacacacacacatacacaattttcaagtcttagctaccctgttcagcatgatgttgaacagaaaatttataattatagaccaaaacactagcctaggttttttttctcctgaattatttcagtccaattttactattgcaactcaagaacagagagaattttcttgtactttaaaaatataatttgaggactgtgaacaggcctgtgaatgcagctaggatcatcattgttgctcagaagaacccacctagaaccctcaggacacaggaactgaggggtagcctgagactggagccttctggtctccatctgtgcccagagctgatactatgccacagagctatatgcacaaataccaccaaaagaaaagctgacctcccaggagtgcctgcacacctgtgagcacaagtaagaccaccactgtgatggcccaagagagaccaccacagagccatgagaacacaggagccaaggatcagctggggacaagatcattctggtctctatctgtaccccagagctgactctgttctgcagcactccatacgcaaattcctcccagcaaaactggtctcccaagagtactgacacacaggcttgcaggagggacaagccaaagtcagagacagcaagaccagttaacaccagagacaaccagatggcaaaaggcaagagcaagaagaacttaagaaacagaaaccaagactacttgccatcatcagaacccatttctcccaccacagcaaaccctggttaccccaacacatcagaaaagccagactatgatttaaaaatcacatctcatgttgatgatagaggaatttaagaaggacataaatgactcccttaaagaaatacaagagaacacaggtaaacaggtagcagaacttaaagaggaaacataaaaaccctttaaagaatttacaggaaaacacaaacaggtgaaggaactgaaaagtggaaatagaaacaataaagaaatcacaaatgaaaacaacactggagatagaaagcctaggaaagagtccaggagacatagatgcaagcatcaccaacagaatacacgagatagaagtgagaatctcagatgcagaagattccataggaaacaataacacaacagtcgaaaaaaatgcaaaatgcagaacactcctaactcaaaacattcaggaaatccagaacacattgagaagtaggtatagaaaagagtgaagattcccaagttagagggccagtaaatatcttcaacagaattatagaagaaaacttccctaacctaaagaaagagatgcccatgaacatacaagaagcctatagaacttcaaatagagtagaccggaaaagaaattcctcctgtcatataataatcaaaacaccaaactcactaaacaaagaaagaatattaagagcagagagggaaaaagatcaagtaacataaaggcaaatctatcagaattacaccagacttctcaccagagactgtgaaagctagaagatcctgggcagatctaaaacagatcttaagagaacacaaatgccaacccagactactataccccaaaaaactttcaattaccatagatggtgaaaccaagaatttccatgacaaatccaaattttcacaatattttttcacaaatccagccctacaaagaataaggaaggagggaaaacataccctataaaaagcaagaaagtaatcttctttcaacaaacccaaaagaagataaccacacaaacaaaaaaataacatcaatgaaaacggggagcaacaatcactattccttaatatcttttaacatcaatggactcgattccccagtaaaaagacaaagactaacagactggatacacaaaaaggacccaacattttgctctatacagtacacgcacctcagtgtcaaagacaaacactacctcaaagaagagggctggaaaacaattttccaagcaaatggttcaaagaaacaagctagagtagccattctaataaagtctattttcaaccaaaagacatcaaaaagtgtaagcaagaacacttcattttcatcaaaggaaaaatctacctggaagaactctcaactctgaacacctatgctccaaatgcaagggcacatacatgcatttaaaaacaacaaacaaacaaacaaacaaacaaacaaacaaaaactttactaaagctcaaagcacacattgtacctcacacaataatagtaggagacttcaacacctcactctcatcaatggacagatgggttttgtacagagttctatcagaccttcaaagaaaacctattaccaataatcctcaaattattccataaaataaaaacaggagtaactctacccaactccttctatgaagccacaattactctgatacctaaaccacacaaaggcccagcaaaaaaaagagaacttcagacccatttcccttatgaatatcgatgcaaaaatactccataaaactctcgcaaaccaagaacacttcaaaaagatcattcctcatgatcaagtaggcctcatcccaggggttgaggcatgggttcaatatacagaaaacgatcaacgtaatccactatagaaacaaactcaaagcaaaaaaccgtatgatcatttcaatagattctgagaaagcatttgacaaaatctaatgccacttcatgataaaagtcttggaaaattcaggaattcaaggcccatatctaaacagagtaaaagcaatacacagcaaaccagtagccaacatcaaagtaaatgatgagaagctggaagcaatcccactaaaatcaggaactagacaaggctgcccactctctcccttcttgttcaatatactactcaaagtcctacccggagcaattagacaacaaaaggaggtcaaagggatacaaactagaaaggaagacagcaaatattactatttgcagataaaatgatagtatacataagtgaccctaaaaattcccccagagaactcctgaacctgataaacaacttcagcaaagtagctgaatacaaaattaactcaaacaaatcagtggccttcttctactcaaaggataaacaggctgagaaagaaattagggaaacaacacctttcaaatactctcaaataatataaaatgccttggtgtgactcttactaagcaagtgaaagatcaatatgacaagaacttcaagtctctgaagaaagaaatcgaaaaagatctgagaagatggaaaaatcttccatgttcatggattggcaggattaatatggtaaaaatgtccatcttgccaaaagcaatgtatagattcaatgcaattcccatcaaaattccaactcaattctacaaagagatagaaggacaaatttacaaattcatctggattaacaaaaaacctaggatagcaaaaactattctcaacaataaaagaacttctggtggaatcactatccctgacctcaagctgtactacagagcaattgtgattaaaaacaaacaaacaaacaaacaaacaaaaaaggcctggtattggtacagagacaggcaggtagatcaatggaatagaattgaagacccagaaatgaacccacatacatatattcacttgatctttgacaaaggagccaaaaccatccagtggaataaaaacagcattttcaacaaatggtgctggttcaactgtctgtctgttagcatgtagaagaatgcaaattgactcattcttatctccttgtaaaaagctcaagtccaagtggatcaaggacctccacataaaaccagatacattgaaactaagagaaaacaaagtggggaagagccctaagcacatgggcacaggggaaattttcctgaacagaagaacaccaatagcttatgctctaagaccaagaattgacaaatgggacctcataaaattgcaaagcttctgtatggcaaacaacactgtcaataggacaaaacggcaaccagcagattgggaaaagatctttaccaatacttcatccgatagaaggctaatatccaatatatgcaaagaattcaagaagttagactccagagaaccaaataaccctattaaaaatgggtgcagagttcaacaaagaattctcaattgcggaatagtgaatggttgagaagcacctaaataaatgttcaacatccttagtcatcagggaaatgcaaatcaaaacaaccctgaggttcaaccttacaccagtcataatggctaagatcaaaaactcaggtgacaggaggtgatggtgaggatgtggagaaagtggaacactcctccattgttggtgggattgccagctggtacaatcattctggaaatcagtctggtggttccttaggaaattagacctgaacccagcaatacctctcctgggcatatatccagaagatgctccaacatgtaataaggacacatgctccactatgttcatagcagccttatttgtaatagccagatgctggaaagaacccagatgtccctcaacagaggaatggatacagaaaatgtggtccatttacacaatggagtactactcagctattaaaaacaattaaattatgaaattcttaggcaaattgatggatctggaggatatcatcctgagtgaggtaacccaatcacaaaagaacacacatggtattcactcactgataagtggatattagctcagaagctcagaatactgaagacccaattctcagaccacatgaaggccaagaagaaggaagaccaaactgtggatacttcggtcctccttagaagggggaacaaaatacctctgggaggagttacagagacaaagtgtggagtagagattgaaggaaaggccattcagagactgtcccacctggggatccatcccatatacagccactcaatccagatgctatgatggatgccaacatgtgcttgaggacaggagactgatatagctgtctcctgaggggctttaccagtgcctgacaaatacagacgtggatactctcagtcaaccattggactgtacagtgtccccaatggaggaactagagaaaggacctaagcagctgaagggatttgcagccccatagaacgaacaacaatatgaatgaactagtaccaccagagctcccaggtctaaagcaccaaccaaagagtacacatggtgggactcatggctccagctgcatatgtagcagaggatggccttgtcattcatcaaagggaggagaggcccttggtcctgtgaaggctctatgccccatagggaattgccagggacaggaagcaggtgtggatggattggtgagcaggagggaagaggaaggggatagggtgttttcagaggggaaaccaggaaagggaataacacttgaaatgtaaataaagaaaatatctaataaaacaaataaacaaacaaaagaaaaatacaattcctgttactatgatttgaacttattgtgaggttgttgaaattttaagataatgcatagctctctacccctttagtctagtagttttttccctctgcatttttaatattaatttaggaagatgctgaagttttggctcagtggttaacagcattagctagtcttccagtggattccctgaacccagacgtgatcccataaccatttgtaactctattttctgcagatctaatagagtctcctgacttctacaggcacaagcatgcatgtggtgcacattcatttgggcaaaacactcatacaaatacttattaatttgtataaaagtgtactactcttgccaaattaactgtgtgtatcttttgaatatttgagtttactgagtatatatttatatatttatactattcggcttcacaaaatgttatcttttaattctgattccatgtcaggacctgtgttatgtcttcatgtctatatcataatcatacagatttgtatatgtttgcttttagcaagcattcaatgaatggataatttttttaaagtatcacttgacttttcaagcataactgataatctacctgttttaatagatctcattcccttagacatctttctacatggtgcaaactaactgaaattccttcccactcaaggttagcaaactctcagatcacaattaaacactatccgatattttgaaaatgtgtgtgttcaactaattgtgaattaatgtactaactcttggcaactgaaaactataattttctttctagttcaccagagctaacaattatgtttcccttgtggtcacatgaaactggtccaatgatgatattggacctttctttggcttatttaaaatgattggctgtaaccaccaggctgcccatagctccctgcaggcgtgcacagcccaggccttcatgtgtgactccgcagctagggcagagtctcctcctccaatcccaccccttccttgctgggttaaagatcttgagaagctgaaattaaagtatctacccaaagttttttgaatatgagtgcaagtccccagacagctttttaaaatccaacaacgtcccctttctagcttcttctgctagggttaaggttctgtgtcatgccataaaataaggttcactgcagttaattaggaattaaattgatttccccttaagggaaatcatttattcatagcaacctataatatgtcgctatgagtcgattgaactttcgcttcgcctcgttgatctcttttcagctccaagcttacctgactatgaaggagttgatgcctctctgaatgaaactgccaccaccatcacagtactattgaggcctgcacaagccaaaggtgctcctatcaggtaagggggtgggaatggtcaaaaggaaaagctgccagtgagagaagtgtcttcctatggttcttttcttcctatgatatggttattcatttgaacaaagattgcaaatagacctgtagttaagaggggacttccaagggtgtttctgtcccatctaagactattgctgtctgtattctgtttcatttcacttcctctactgggatctgtaccttgaaggtatttgtcaaataatctgaggaagtaattcttgtccaactctgtgtatctcttatgagtaatttcacgtgagagaccaaaatcacgtgaggattttgaaagaaatgcagaagaataaaagcagatcaagcccctgtggcctttcagctcttaaattatcagaaatttcataataaagtgcagcttactggttcctttatcttttaatattaaaatctttcctattacctactactgctattctctccaataaaaaatctgatccatgtcaaaaaatatactagtccatgtcatttttagaggttaataaaattatttcagctttttatattttgaacaactacagatgaaccttcaaaattctgattgcaaccaatagctatgtgggcattttgttaatcaatattaataagaaaaccatataggtataaaggtaaggcacatctgagagcaggattgagttttgtgctgtttataaatcctttcaaaagccggtcagtctctgttctgtatgtaaaaccaatatccttgacttaaagaaactgatgtcttttgtcatcagagttgtacagtattttttcatgaataaaaaatatgttgatgaacatgagtcacaaagaaaacttgcaatccccatctagctaaaattcagtgcaccaccacattccagaacaagagaggtcgctagtgtgcctgtaacatagatgctctggaacatcagctacttgaacatctgaagtcagtatacagtgctgttcaggaatcgatctccaaatcattttgattgctggtatgaagaggagtagaaaatgtctcattcagctggacttggtgtccttctctattggcacgtattcatcgccattcacatgtccctagtagggacaaaacttacaccataggcatttaatcagttcctgatgtttaagaggattccaggtagctgtatttctcttttaaagtttgccttggtctggagagatggctcagtggaaagagcactaacagccctttagaagaatctggttcaacccctagcactcacctgttgactcacaaatatctaaaactcctgtcacaggaaatatgatattctctctggcatcctcgggcactgcacacatgtgctacacagacacacattcaaaaaaaaaaaaaaaaaagtcagcaaaacaaaaataaataaataaataaaatttaaaactatttgaaatccctaaaaatgttaagtgaagccatctttttcttcaggtattattatcattattattgtcaggctgtgctgtataacttatatgatcctttgttcacttaatcaaatttttttctgcaaattttgaccatttattaagtgcctgtcacccatcttaatattataaattaaagatacactgatcataacacaacacagtgtctcttcccaggtttcttagggtatcaggggtcattctatcatgtagatcctgagctaattgacagtgctcaggaattctgtgtattttctatgggtttgattaaacgactttcttgtcttctgcttgcctttatatatgcatgatttctaattactaagaattcataaggtctaaaccagcaactatacaaaaataattcttaatagtcatttatctttccctggcatggaaatgtgcctcattgtatttgttagcaattcctggaattgagcccactggctaggcactgcaaattatatagtacagatgagtagttctcagaaaacaagttgaaggactggagatatcattcagtaggcaagac

SEQ ID NO: 135 - DNA, 1697 bp, Mus musculus
gcttccctttctaggtggctgtacttttgatgatgggccaggggcttgtgactaccaccaggatttatacgatgactttgagtgggtccatgtcagtgcgcaggaacctcattacctgccccccgaaatgcctcaaggttcctatatggttgtggactcctcaaatcatgatcctggagaaaaagccagacttcagctgcctaccatgaaggagaatgacacccactgcattgatttcagttacctgttatatagccagaaggggttgaaccctggcactttgaatatcctagttagggtgaataaaggacctcttgctaatccaatttggaatgtaactggattcactggtcgtgattggcttcgggctgaactagctgtgagcaccttttggcccaatgaataccaggtaatatttgaagctgaagtctcaggagggagaagtggttatattgccattgatgacatccaagtcctgagttatccttgcgataaatctcctcattttctccgccttggtgatgtggaggtcaatgctgggcagaatgctacatttcagtgcattgctacagggagagatgctgtgcataacaagttatggctgcagagacgcaatggagaagacatacccgtagcccagactaagaacataaatcacagaagatttgctgcctctttcagattgcaagaagtgacaaaaactgaccaggatttgtaccgctgcgtaactcagtcagaacgaggttctggggtttccaattttgctcaactcattgtgagagaaccacctagacccattgctcctccccagctgcttggtgttgggcctacttacttgctgatccaactaaatgccaactctattattggcgatggccccatcatcctgaaagaagtagagtatcgaatgacatcaggatcttggacagaaacccatgcagtcaacgcaccaacatataagttgtggcatttagacccagatacagaatacgagatccgcgtcctgcttaccagacctggcgaagggggaactgggctgccaggaccaccactgatcactagaacgaagtgtgcagaacctatgcggacaccaaagactttaaagattgctgaaatccaggcaaggcgcattgcagtggactgggagtccttgggctacaacatcactcgttgccacactttcaacgtcactatctgctaccattacttccgtggccacaatgagagcagggcagactgcttggacatggaccccaaagcccctcagcatgttgtgaaccatctgccaccttacacaaatgtcagcctcaagatgatcctaaccaacccagagggaaggaaggagagcgaagagacaatcatccaaactgatgaagatgtgcccgggcctgtgccagtcaaatccctccaaggaacatcctttgaaaacaagatcttcctgaactggaaagagccactggaaccgaatggaattatcactcagtatgaggtgagctatagcagcataagatcatttgaccctgctgttccagtggctgggcccccacagactgtatcaaatttatggaatagtacacaccatgtatttatgcatcttcaccctggaaccacctaccagttttttataagagccagcactgtcaaaggctttggaccagcaacagccatcaatgtgaccacaaatatctcaggtaagc

SEQ ID NO: 136 - protein, 558 aa, Mus musculus
  VARIANT (1)...(558): Xaa = Any Amino Acid
LPFLGGCTFDDGPGACDYHQDLYDDFEWVHVSAQEPHYLPPEMPQGSYMVVDSSNHDPGEKARLQLPTMKENDTHCIDFSYLKQKQPGTLNILVRVNKGPLANPIWNVTGFTGRDWLRAELAVSTFWPNEYQVIFEAEVSGGRSGYIAIDDIQVLSYPCDKSPHFLRLGDVEVNAGQNATFQCIATGRDAVHNKLWLQRRNGEDIPVAQTKNINHRRFAASFRLQEVTKTDQDLYRCVTQSGSGVSNFAQLIVREPPRPIAPPQLLGVGPTYLLIQLNANSIIGDGPIILKEVEYRMTSGSWTETHAVNAPTYKLWHLDPDTEYEIRVLLWGEGGTGLPGPPLITRTKCAEPMRTPKTLKIAEIQARRIAVDWESLGYNITRCHTFNVTICYHYFRGHNESRADCLDMDPKAPQHVVNHLPPYTNVSLKMILTNPEGRKESEETIIQTDEDVPGPVPVKSLQGTSFENKIFLNWKEPLEPNGIITQYEVSYSSIRSFDPAVPVAGPPQTVSNLWNSTHHVFMHLHPGTTYQFFIRASTVKGFGPATAINVTTNISGKX

(The sequence listing continues in the following parts.)

What is claimed is:

1. An isolated nucleic acid comprising at least 10 contiguous nucleotides of a sequence selected from the group consisting of the polynucleotide sequences of SEQ ID NOS: 5, 11, 17, 19, 21, 27, 33, 47, 49, 51, 53, 55, 61, 63, 65, 71, 81, 83, 85, 87, 89, 97, 99, 101, 103, 105, 107, 109, 115, 117, 119, 121, 123, 125, 127, 129, 138, 140, 142, 144, 146, 148, 154, 156, 158, 160, 162, 164, 166, 168, 174, 176, 178, 180, 188, 190, 192, 194, 196, 198, 200, 202, 204, 210, 212, 214, 216, 218, 224, 230, 236, 238, 244, 246, 248, 250, 256, 262, 268, 270, 272, 274, 276, 282, 284, 286, 288, 294, 296, 298, 304, 306, 312, 314, 316, 322, 324, 326, 328, 330, 332, 342, 344, 346, 348, 350, 352, 354, 360, 368, 370, 376, 384, 386, 388, 390, 392, 398, 400, 402, 408, 414, 416, 418, 420, 428, 430, 432, 434, 436, 438, 440, 442, 444, 450, 456, 458, 464, 466, 468, 474, 476, 482, 484, 486, 492, 494, 500, 508, 510, 516, 522, 528, 530, 532, 534, 536, 542, 548, 550, 556, 558, 564, 566, 568, 570, 572, 574, 576, 578, 580, 582, 584, 586, 588, 590, 592, 594, 596, 598, 600, 602, 604, 606, 608, 610, 612, 614, 616, 618, 620, 622, 624, 626, 628, 630, 632, 634, 644, 646, 652, 654, 660, 662, 664, 670, 672, 674, 676, 682, 684, 686, 688, 690, 692, 694, 696, 698, 700, 702, 704, 706, 708, 710, 716, 718, 724, 726, 728, 730, 732, 734, 736, 744, 750, 752, 754, 760, 776, 778, 780, 782, 788, 794, 796, 798, 800, 806, 812, 818, 824, 826, 828, 834, 840, 842, 844, 846, 852, 854, 856, 862, 864, 866, 872, 874, 880, 882, 884, 886, 888, 890, 892, 894, 900, 902, 910, 912, 918, 920, 922, 931, 933, 939, 941, 943, 945, 951, 953, 955, 957, 959, 961, 967, 969, 977, 979, 981, 983, 985, 991, 993, 995, 997, 1003, 1005, 1017, 1025, 1027, 1029, 1031, 1033, 1035, 1041, 1047, 1049, 1055, 1057, 1059, 1061, 1063, 1069, 1071, 1073, 1075, 1077, 1083, 1089, 1091, 1093, 1103, 1105, 1113, 1115, 1117, 1123, 1125, 1131, 1133, 1135, 1141, 1143, 1145, 1147, 1149, 1152, 1154, 1156, 1158, 1160, 1166, 1168, 1170, 1176, 1178, 1180, 1186, 1188, 1194, 1196, 1198, 1200, 1206, 1212, 1214, 1216, 1218, 1220, 1222, 1224, 1226, 1228, 1230, 1236, 1242, 1244, 1246, 1248, 1250, 1256, 1258, 1260, 1262, 1268, 1270, 1272, 1278, 1280, 1282, 1284, 1286, 1288, 1290, 1296, 1302, 1304, 1306, 1308, 1314, 1316, 1318, 1320, 1322, 1324, 1326, 1328, 1330, 1332, 1334, 1336, 1338, 1340, 1342, 1350, 1352, 1358, 1360, 1362, 1364, 1370, 1372, 1378, 1384, 1386, 1392, 1394, 1396, 1398, 1404, 1406, 1412, 1414, 1420, 1426, 1432, 1434, and 1440 shown in Tables 1-124, or its complement.

2. A host cell comprising a recombinant nucleic acid of claim 1.

3. An expression vector comprising the isolated nucleic acid according to claim 1.

4. A host cell comprising the expression vector of claim 3.

5. The polynucleotide according to claim 1, wherein said polynucleotide, or its complement or a fragment thereof, further comprises a detectable label.

6. The polynucleotide according to claim 1, wherein said polynucleotide, or its complement or a fragment thereof, is attached to a solid support.

7. The polynucleotide according to claim 1, wherein said polynucleotide, or its complement or a fragment thereof, is prepared at least in part by chemical synthesis.

8. The polynucleotide according to claim 1, wherein said polynucleotide, or its complement or a fragment thereof, is an antisense fragment.

9. The polynucleotide according to claim 1, wherein said polynucleotide, or its complement or a fragment thereof, is single stranded.

10. The polynucleotide according to claim 1, wherein said polynucleotide, or its complement or a fragment thereof, is double stranded.

11. The polynucleotide according to claim 1, comprising at least 15 contiguous nucleotides.

12. The polynucleotide according to claim 1, comprising at least 20 contiguous nucleotides.

13. A microarray for detecting a cancer associated (CA) nucleic acid comprising:
at least one probe comprising at least 10 contiguous nucleotides of a sequence selected from the group consisting of the polynucleotide sequences SEQ ID NOS: 5, 11, 17, 19, 21, 27, 33, 47, 49, 51, 53, 55, 61, 63, 65, 71, 81, 83, 85, 87, 89, 97, 99, 101, 103, 105, 107, 109, 115, 117, 119, 121, 123, 125, 127, 129, 138, 140, 142, 144, 146, 148, 154, 156, 158, 160, 162, 164, 166, 168, 174, 176, 178, 180, 188, 190, 192, 194, 196, 198, 200, 202, 204, 210, 212, 214, 216, 218, 224, 230, 236, 238, 244, 246, 248, 250, 256, 262, 268, 270, 272, 274, 276, 282, 284, 286, 288, 294, 296, 298, 304, 306, 312, 314, 316, 322, 324, 326, 328, 330, 332, 342, 344, 346, 348, 350, 352, 354, 360, 368, 370, 376, 384, 386, 388, 390, 392, 398, 400, 402, 408, 414, 416, 418, 420, 428, 430, 432, 434, 436, 438, 440, 442, 444, 450, 456, 458, 464, 466, 468, 474, 476, 482, 484, 486, 492, 494, 500, 508, 510, 516, 522, 528, 530, 532, 534, 536, 542, 548, 550, 556, 558, 564, 566, 568, 570, 572, 574, 576, 578, 580, 582, 584, 586, 588, 590, 592, 594, 596, 598, 600, 602, 604, 606, 608, 610, 612, 614, 616, 618, 620, 622, 624, 626, 628, 630, 632, 634, 644, 646, 652, 654, 660, 662, 664, 670, 672, 674, 676, 682, 684, 686, 688, 690, 692, 694, 696, 698, 700, 702, 704, 706, 708, 710, 716, 718, 724, 726, 728, 730, 732, 734, 736, 744, 750, 752, 754, 760, 776, 778, 780, 782, 788, 794, 796, 798, 800, 806, 812, 818, 824, 826, 828, 834, 840, 842, 844, 846, 852, 854, 856, 862, 864, 866, 872, 874, 880, 882, 884, 886, 888, 890, 892, 894, 900, 902, 910, 912, 918, 920, 922, 931, 933, 939, 941, 943, 945, 951, 953, 955, 957, 959, 961, 967, 969, 977, 979, 981, 983, 985, 991, 993, 995, 997, 1003, 1005, 1017, 1025, 1027, 1029, 1031, 1033, 1035, 1041, 1047, 1049, 1055, 1057, 1059, 1061, 1063, 1069, 1071, 1073, 1075, 1077, 1083, 1089, 1091, 1093, 1103, 1105, 1113, 1115, 1117, 1123, 1125, 1131, 1133, 1135, 1141, 1143, 1145, 1147, 1149, 1152, 1154, 1156, 1158, 1160, 1166, 1168, 1170, 1176, 1178, 1180, 1186, 1188, 1194, 1196, 1198, 1200, 1206, 1212, 1214, 1216, 1218, 1220, 1222, 1224, 1226, 1228, 1230, 1236, 1242, 1244, 1246, 1248, 1250, 1256, 1258, 1260, 1262, 1268, 1270, 1272, 1278, 1280, 1282, 1284, 1286, 1288, 1290, 1296, 1302, 1304, 1306, 1308, 1314, 1316, 1318, 1320, 1322, 1324, 1326, 1328, 1330, 1332, 1334, 1336, 1338, 1340, 1342, 1350, 1352, 1358, 1360, 1362, 1364, 1370, 1372, 1378, 1384, 1386, 1392, 1394, 1396, 1398, 1404, 1406, 1412, 1414, 1420, 1426, 1432, 1434, and 1440 shown in Tables 1-124, or its complement.

14. The microarray according to claim 13, comprising at least 15 contiguous nucleotides.

15. The microarray according to claim 13, comprising at least 20 contiguous nucleotides.

16. An isolated polypeptide, encoded within an open reading frame of a CA sequence selected from the group consisting of the polynucleotide sequences of SEQ ID NOS: 4, 10, 16, 26, 32, 46, 60, 70, 80, 96, 114, 137, 153, 173, 187, 209, 223, 229, 235, 243, 255, 261, 267, 281, 293, 303, 311, 321, 341, 359, 367, 375, 383, 397, 407, 413, 427, 449, 455, 463, 473, 481, 491, 499, 507, 515, 521, 527, 541, 547, 555, 563, 643, 651, 659, 669, 681, 715, 723, 743, 749, 759, 775, 787, 793, 805, 811, 817, 823, 833, 839, 851, 861, 871, 879, 899, 909, 917, 930, 938, 950, 966, 976, 990, 1002, 1016, 1024, 1040, 1046, 1054, 1068, 1082, 1088, 1102, 1112, 1122, 1130, 1140, 1151, 1165, 1175, 1185, 1193, 1205, 1211, 1235, 1241, 1255, 1267, 1277, 1295, 1301, 1313, 1349, 1357, 1369, 1377, 1383, 1391, 1403, 1411, 1419, 1425, 1431, and 1439 shown in Tables 1-124, or its complement.

17. The polypeptide of claim 16, wherein said polypeptide comprises the amino acid sequence encoded by a polynucleotide selected from the group consisting of SEQ ID NOS: 5, 11, 17, 19, 21, 27, 33, 47, 49, 51, 53, 55, 61, 63, 65, 71, 81, 83, 85, 87, 89, 97, 99, 101, 103, 105, 107, 109, 115, 117, 119, 121, 123, 125, 127, 129, 138, 140, 142, 144, 146, 148, 154, 156, 158, 160, 162, 164, 166, 168, 174, 176, 178, 180, 188, 190, 192, 194, 196, 198, 200, 202, 204, 210, 212, 214, 216, 218, 224, 230, 236, 238, 244, 246, 248, 250, 256, 262, 268, 270, 272, 274, 276, 282, 284, 286, 288, 294, 296, 298, 304, 306, 312, 314, 316, 322, 324, 326, 328, 330, 332, 342, 344, 346, 348, 350, 352, 354, 360, 368, 370, 376, 384, 386, 388, 390, 392, 398, 400, 402, 408, 414, 416, 418, 420, 428, 430, 432, 434, 436, 438, 440, 442, 444, 450, 456, 458, 464, 466, 468, 474, 476, 482, 484, 486, 492, 494, 500, 508, 510, 516, 522, 528, 530, 532, 534, 536, 542, 548, 550, 556, 558, 564, 566, 568, 570, 572, 574, 576, 578, 580, 582, 584, 586, 588, 590, 592, 594, 596, 598, 600, 602, 604, 606, 608, 610, 612, 614, 616, 618, 620, 622, 624, 626, 628, 630, 632, 634, 644, 646, 652, 654, 660, 662, 664, 670, 672, 674, 676, 682, 684, 686, 688, 690, 692, 694, 696, 698, 700, 702, 704, 706, 708, 710, 716, 718, 724, 726, 728, 730, 732, 734, 736, 744, 750, 752, 754, 760, 776, 778, 780, 782, 788, 794, 796, 798, 800, 806, 812, 818, 824, 826, 828, 834, 840, 842, 844, 846, 852, 854, 856, 862, 864, 866, 872, 874, 880, 882, 884, 886, 888, 890, 892, 894, 900, 902, 910, 912, 918, 920, 922, 931, 933, 939, 941, 943, 945, 951, 953, 955, 957, 959, 961, 967, 969, 977, 979, 981, 983, 985, 991, 993, 995, 997, 1003, 1005, 1017, 1025, 1027, 1029, 1031, 1033, 1035, 1041, 1047, 1049, 1055, 1057, 1059, 1061, 1063, 1069, 1071, 1073, 1075, 1077, 1083, 1089, 1091, 1093, 1103, 1105, 1113, 1115, 1117, 1123, 1125, 1131, 1133, 1135, 1141, 1143, 1145, 1147, 1149, 1152, 1154, 1156, 1158, 1160, 1166, 1168, 1170, 1176, 1178, 1180, 1186, 1188, 1194, 1196, 1198, 1200, 1206, 1212, 1214, 1216, 1218, 1220, 1222, 1224, 1226, 1228, 1230, 1236, 1242, 1244, 1246, 1248, 1250, 1256, 1258, 1260, 1262, 1268, 1270, 1272, 1278, 1280, 1282, 1284, 1286, 1288, 1290, 1296, 1302, 1304, 1306, 1308, 1314, 1316, 1318, 1320, 1322, 1324, 1326, 1328, 1330, 1332, 1334, 1336, 1338, 1340, 1342, 1350, 1352, 1358, 1360, 1362, 1364, 1370, 1372, 1378, 1384, 1386, 1392, 1394, 1396, 1398, 1404, 1406, 1412, 1414, 1420, 1426, 1432, 1434, and 1440 shown in Tables 1-124.

18. The polypeptide of claim 16, wherein said polypeptide comprises the amino acid sequence encoded by a polypeptide selected from the group consisting of SEQ ID NOS: 6, 12, 18, 20, 22, 28, 34, 48, 50, 52, 54, 56, 62, 64, 66, 72, 82, 84, 86, 88, 90, 98, 100, 102, 104, 106, 108, 110, 116, 118, 120, 122, 124, 126, 128, 130, 139, 141, 143, 145, 147, 149, 155, 157, 159, 161, 163, 165, 167, 169, 175, 177, 179, 181, 189, 191, 193, 195, 197, 199, 201, 203, 205, 211, 213, 215, 217, 219, 225, 231, 237, 239, 245, 247, 249, 251, 257, 263, 269, 271, 273, 275, 277, 283, 285, 287, 289, 295, 297, 299, 305, 307, 313, 315, 317, 323, 325, 327, 329, 331, 333, 343, 345, 347, 349, 351, 353, 355, 361, 369, 371, 377, 385, 387, 389, 391, 393, 399, 401, 403, 409, 415, 417, 419, 421, 429, 431, 433, 435, 437, 439, 441, 443, 445, 451, 457, 459, 465, 467, 469, 475, 477, 483, 485, 487, 493, 495, 501, 509, 511, 517, 523, 529, 531, 533, 535, 537, 543, 549, 551, 557, 559, 565, 567, 569, 571, 573, 575, 577, 579, 581, 583, 585, 587, 589, 591, 593, 595, 597, 599, 601, 603, 605, 607, 609, 611, 613, 615, 617, 619, 621, 623, 625, 627, 629, 631, 633, 635, 645, 647, 653, 655, 661, 663, 665, 671, 673, 675, 677, 683, 685, 687, 689, 691, 693, 695, 697, 699, 701, 703, 705, 707, 709, 711, 717, 719, 725, 727, 729, 731, 733, 735, 737, 745, 751, 753, 755, 761, 777, 779, 781, 783, 789, 795, 797, 799, 801, 807, 813, 819, 825, 827, 829, 835, 841, 843, 845, 847, 853, 855, 857, 863, 865, 867, 873, 875, 881, 883, 885, 887, 889, 891, 893, 895, 901, 903, 911, 913, 919, 921, 923, 932, 934, 940, 942, 944, 946, 952, 954, 956, 958, 960, 962, 968, 970, 978, 980, 982, 984, 986, 992, 994, 996, 998, 1004, 1006, 1018, 1026, 1028, 1030, 1032, 1034, 1036, 1042, 1048, 1050, 1056, 1058, 1060, 1062, 1064, 1070, 1072, 1074, 1076, 1078, 1084, 1090, 1092, 1094, 1104, 1106, 1114, 1116, 1118, 1124, 1126, 1132, 1134, 1136, 1142, 1144, 1146, 1148, 1150, 1153, 1155, 1157, 1159, 1161, 1167, 1169, 1171, 1177, 1179, 1181, 1187, 1189, 1195, 1197, 1199, 1201, 1207, 1213, 1215, 1217, 1219, 1221, 1223, 1225, 1227, 1229, 1231, 1237, 1243, 1245, 1247, 1249, 1251, 1257, 1259, 1261, 1263, 1269, 1271, 1273, 1279, 1281, 1283, 1285, 1287, 1289, 1291, 1297, 1303, 1305, 1307, 1309, 1315, 1317, 1319, 1321, 1323, 1325, 1327, 1329, 1331, 1333, 1335, 1337, 1339, 1341, 1343, 1351, 1353, 1359, 1361, 1363, 1365, 1371, 1373, 1379, 1385, 1387, 1393, 1395, 1397, 1399, 1405, 1407, 1413, 1415, 1421, 1427, 1433, 1435, and 1441 shown in Tables 1-124.

19. The polypeptide of claim 16, wherein said polypeptide comprises the amino acid sequence of an epitope of the amino acid sequence of a CA polypeptide selected from the group consisting of SEQ ID NOS: 6, 12, 18, 20, 22, 28, 34, 48, 50, 52, 54, 56, 62, 64, 66, 72, 82, 84, 86, 88, 90, 98, 100, 102, 104, 106, 108, 110, 116, 118, 120, 122, 124, 126, 128, 130, 139, 141, 143, 145, 147, 149, 155, 157, 159, 161, 163, 165, 167, 169, 175, 177, 179, 181, 189, 191, 193, 195, 197, 199, 201, 203, 205, 211, 213, 215, 217, 219, 225, 231, 237, 239, 245, 247, 249, 251, 257, 263, 269, 271, 273, 275, 277, 283, 285, 287, 289, 295, 297, 299, 305, 307, 313, 315, 317, 323, 325, 327, 329, 331, 333, 343, 345, 347, 349, 351, 353, 355, 361, 369, 371, 377, 385, 387, 389, 391, 393, 399, 401, 403, 409, 415, 417, 419, 421, 429, 431, 433, 435, 437, 439, 441, 443, 445, 451, 457, 459, 465, 467, 469, 475, 477, 483, 485, 487, 493, 495, 501, 509, 511, 517, 523, 529, 531, 533, 535, 537, 543, 549, 551, 557, 559, 565, 567, 569, 571, 573, 575, 577, 579, 581, 583, 585, 587, 589, 591, 593, 595, 597, 599, 601, 603, 605, 607, 609, 611, 613, 615, 617, 619, 621, 623, 625, 627, 629, 631, 633, 635, 645, 647, 653, 655, 661, 663, 665, 671, 673, 675, 677, 683, 685, 687, 689, 691, 693, 695, 697, 699, 701, 703, 705, 707, 709, 711, 717, 719, 725, 727, 729, 731, 733, 735, 737, 745, 751, 753, 755, 761, 777, 779, 781, 783, 789, 795, 797, 799, 801, 807, 813, 819, 825, 827, 829, 835, 841, 843, 845, 847, 853, 855, 857, 863, 865, 867, 873, 875, 881, 883, 885, 887, 889, 891, 893, 895, 901, 903, 911, 913, 919, 921, 923, 932, 934, 940, 942, 944, 946, 952, 954, 956, 958, 960, 962, 968, 970, 978, 980, 982, 984, 986, 992, 994, 996, 998, 1004, 1006, 1018, 1026, 1028, 1030, 1032, 1034, 1036, 1042, 1048, 1050, 1056, 1058, 1060, 1062, 1064, 1070, 1072, 1074, 1076, 1078, 1084, 1090, 1092, 1094, 1104, 1106, 1114, 1116, 1118, 1124, 1126, 1132, 1134, 1136, 1142, 1144, 1146, 1148, 1150, 1153, 1155, 1157, 1159, 1161, 1167, 1169, 1171, 1177, 1179, 1181, 1187, 1189, 1195, 1197, 1199, 1201, 1207, 1213, 1215, 1217, 1219, 1221, 1223, 1225, 1227, 1229, 1231, 1237, 1243, 1245, 1247, 1249, 1251, 1257, 1259, 1261, 1263, 1269, 1271, 1273, 1279, 1281, 1283, 1285, 1287, 1289, 1291, 1297, 1303, 1305, 1307, 1309, 1315, 1317, 1319, 1321, 1323, 1325, 1327, 1329, 1331, 1333, 1335, 1337, 1339, 1341, 1343, 1351, 1353, 1359, 1361, 1363, 1365, 1371, 1373, 1379, 1385, 1387, 1393, 1395, 1397, 1399, 1405, 1407, 1413, 1415, 1421, 1427, 1433, 1435, and 1441 shown in Tables 1-124.

20. The polypeptide of claim 16, wherein said polypeptide is expressed on a cell surface, wherein the CA protein selected from the group consisting of SEQ ID NOS: 6, 12, 18, 20, 22, 28, 34, 48, 50, 52, 54, 56, 62, 64, 66, 72, 82, 84, 86, 88, 90, 98, 100, 102, 104, 106, 108, 110, 116, 118, 120, 122, 124, 126, 128, 130, 139, 141, 143, 145, 147, 149, 155, 157, 159, 161, 163, 165, 167, 169, 175, 177, 179, 181, 189, 191, 193, 195, 197, 199, 201, 203, 205, 211, 213, 215, 217, 219, 225, 231, 237, 239, 245, 247, 249, 251, 257, 263, 269, 271, 273, 275, 277, 283, 285, 287, 289, 295, 297, 299, 305, 307, 313, 315, 317, 323, 325, 327, 329, 331, 333, 343, 345, 347, 349, 351, 353, 355, 361, 369, 371, 377, 385, 387, 389, 391, 393, 399, 401, 403, 409, 415, 417, 419, 421, 429, 431, 433, 435, 437, 439, 441, 443, 445, 451, 457, 459, 465, 467, 469, 475, 477, 483, 485, 487, 493, 495, 501, 509, 511, 517, 523, 529, 531, 533, 535, 537, 543, 549, 551, 557, 559, 565, 567, 569, 571, 573, 575, 577, 579, 581, 583, 585, 587, 589, 591, 593, 595, 597, 599, 601, 603, 605, 607, 609, 611, 613, 615, 617, 619, 621, 623, 625, 627, 629, 631, 633, 635, 645, 647, 653, 655, 661, 663, 665, 671, 673, 675, 677, 683, 685, 687, 689, 691, 693, 695, 697, 699, 701, 703, 705, 707, 709, 711, 717, 719, 725, 727, 729, 731, 733, 735, 737, 745, 751, 753, 755, 761, 777, 779, 781, 783, 789, 795, 797, 799, 801, 807, 813, 819, 825, 827, 829, 835, 841, 843, 845, 847, 853, 855, 857, 863, 865, 867, 873, 875, 881, 883, 885, 887, 889, 891, 893, 895, 901, 903, 911, 913, 919, 921, 923, 932, 934, 940, 942, 944, 946, 952, 954, 956, 958, 960, 962, 968, 970, 978, 980, 982, 984, 986, 992, 994, 996, 998, 1004, 1006, 1018, 1026, 1028, 1030, 1032, 1034, 1036, 1042, 1048, 1050, 1056, 1058, 1060, 1062, 1064, 1070, 1072, 1074, 1076, 1078, 1084, 1090, 1092, 1094, 1104, 1106, 1114, 1116, 1118, 1124, 1126, 1132, 1134, 1136, 1142, 1144, 1146, 1148, 1150, 1153, 1155, 1157, 1159, 1161, 1167, 1169, 1171, 1177, 1179, 1181, 1187, 1189, 1195, 1197, 1199, 1201, 1207, 1213, 1215, 1217, 1219, 1221, 1223, 1225, 1227, 1229, 1231, 1237, 1243, 1245, 1247, 1249, 1251, 1257, 1259, 1261, 1263, 1269, 1271, 1273, 1279, 1281, 1283, 1285, 1287, 1289, 1291, 1297, 1303, 1305, 1307, 1309, 1315, 1317, 1319, 1321, 1323, 1325, 1327, 1329, 1331, 1333, 1335, 1337, 1339, 1341, 1343, 1351, 1353, 1359, 1361, 1363, 1365, 1371, 1373, 1379, 1385, 1387, 1393, 1395, 1397, 1399, 1405, 1407, 1413, 1415, 1421, 1427, 1433, 1435, and 1441.

21. The polypeptide of claim 16, wherein said polypeptide or fragment thereof is attached to a solid support.

22. An isolated antibody or antigen binding fragment thereof, that binds to a polypeptide according to any one of claims 16-20.

23. The isolated antibody or antigen binding fragment thereof according the claim 22, wherein said antibody or fragment thereof is attached to a solid support.

24. The isolated antibody or antigen binding fragment thereof according the claim 22, wherein said antibody is a monoclonal antibody.

25. The isolated antibody or antigen binding fragment thereof according the claim 22, wherein said antibody is a polyclonal antibody.

26. The isolated antibody or antigen binding fragment thereof according the claim 22, wherein said antibody or fragment thereof further comprises a detectable label.

27. An isolated antibody that binds to a polypeptide, or antigen binding fragment thereof, according to any of claims 16-20, prepared by a method comprising the steps of (i) immunizing a host animal with a composition comprising said polypeptide, or antigen binding fragment thereof, and (ii) collecting cells from said host expressing antibodies against the antigen or antigen binding fragment thereof.

28. The monoclonal antibody according to claim 24, wherein the monoclonal antibody binds to the extracellular domain of the CA protein.

29. The monoclonal antibody according to claim 24, wherein the monoclonal antibody binds to at least one human cancer cell line.

30. The monoclonal antibody according to claim 24, wherein the monoclonal antibody is prepared by a process comprising:
(a) providing a hybridoma capable of producing the monoclonal antibody; and
(b) culturing the hybridoma under conditions that provide for the production of the monoclonal antibody by the hybridoma.

31. A hybridoma that produces the monoclonal antibody according to claim 24.

32. The antibody according to claim 22, wherein the antibody is a humanized antibody.

33. The antibody according to claim 22, wherein the CAP is expressed on a cancer cell surface but not on a normal cell surface.

34. The antibody according to claim 22, wherein the CAP is differentially expressed on a cancer cell surface relative to a normal cell surface.

35. The antibody according to claim 22, wherein the antibody is linked to a therapeutic agent.

36. The antibody according to claim 24, wherein the antibody is linked to a therapeutic agent.

37. A pharmaceutical composition comprising the antibody according to claim 22 and a pharmaceutically acceptable excipient.

38. A pharmaceutical composition comprising the antibody according to claim 35 and a pharmaceutically acceptable excipient.

39. A pharmaceutical composition comprising the antibody according to claim 36 and a pharmaceutically acceptable excipient.

40. A kit for detecting cancer cells comprising the antibody according to claim 22.

41. A kit for detecting cancer cells comprising the monoclonal antibody according to claim 24.

42. A method for detecting a presence or an absence of cancer cells in an individual, the method comprising:
contacting cells from the individual with the antibody according to any of claims 22 or 24;
and detecting a complex of a CAP from the cancer cells and the antibody,
wherein detection of the complex correlates with the presence of cancer cells in the individual.

43. A method for inhibiting growth of cancer cells in an individual, the method comprising: administering to the individual an effective amount of a pharmaceutical composition according to any of claims 37, 38, or 39.

44. A method for delivering a therapeutic agent to cancer cells in an individual, the method comprising: administering to the individual an effective amount of a pharmaceutical composition according to any of claims 37, 38, or 39.

45. A kit for diagnosing the presence of cancer in a test sample, said kit comprising at least one polynucleotide that selectively hybridizes to a CA polynucleotide sequence selected from the group consisting of the polynucleotide sequences SEQ ID NOS: 4, 10, 16, 26, 32, 46, 60, 70, 80, 96, 114, 137, 153, 173, 187, 209, 223, 229, 235, 243, 255, 261, 267, 281, 293, 303, 311, 321, 341, 359, 367, 375, 383, 397, 407, 413, 427, 449, 455, 463, 473, 481, 491, 499, 507, 515, 521, 527, 541, 547, 555, 563, 643, 651, 659, 669, 681, 715, 723, 743, 749, 759, 775, 787, 793, 805, 811, 817, 823, 833, 839, 851, 861, 871, 879, 899, 909, 917, 930, 938, 950, 966, 976, 990, 1002, 1016, 1024, 1040, 1046, 1054, 1068, 1082, 1088, 1102, 1112, 1122, 1130, 1140, 1151, 1165, 1175, 1185, 1193, 1205, 1211, 1235, 1241, 1255, 1267, 1277, 1295, 1301, 1313, 1349, 1357, 1369, 1377, 1383, 1391, 1403, 1411, 1419, 1425, 1431, and 1439 shown in Tables 1-124, or its complement.

46. A kit for diagnosing the presence of cancer in a test sample, said kit comprising at least one polynucleotide that selectively hybridizes to the sequence of a polynucleotide sequence selected from the group consisting of the polynucleotide sequences SEQ ID NOS: 5, 11, 17, 19, 21, 27, 33, 47, 49, 51, 53, 55, 61, 63, 65, 71, 81, 83, 85, 87, 89, 97, 99, 101, 103, 105, 107, 109, 115, 117, 119, 121, 123, 125, 127, 129, 138, 140, 142, 144, 146, 148, 154, 156, 158, 160, 162, 164, 166, 168, 174, 176, 178, 180, 188, 190, 192, 194, 196, 198, 200, 202, 204, 210, 212, 214, 216, 218, 224, 230, 236, 238, 244, 246, 248, 250, 256, 262, 268, 270, 272, 274, 276, 282, 284, 286, 288, 294, 296, 298, 304, 306, 312, 314, 316, 322, 324, 326, 328, 330, 332, 342, 344, 346, 348, 350, 352, 354, 360, 368, 370, 376, 384, 386, 388, 390, 392, 398, 400, 402, 408, 414, 416, 418, 420, 428, 430, 432, 434, 436, 438, 440, 442, 444, 450, 456, 458, 464, 466, 468, 474, 476, 482, 484, 486, 492, 494, 500, 508, 510, 516, 522, 528, 530, 532, 534, 536, 542, 548, 550, 556, 558, 564, 566, 568, 570, 572, 574, 576, 578, 580, 582, 584, 586, 588, 590, 592, 594, 596, 598, 600, 602, 604, 606, 608, 610, 612, 614, 616, 618, 620, 622, 624, 626, 628, 630, 632, 634, 644, 646, 652, 654, 660, 662, 664, 670, 672, 674, 676, 682, 684, 686, 688, 690, 692, 694, 696, 698, 700, 702, 704, 706, 708, 710, 716, 718, 724, 726, 728, 730, 732, 734, 736, 744, 750, 752, 754, 760, 776, 778, 780, 782, 788, 794, 796, 798, 800, 806, 812, 818, 824, 826, 828, 834, 840, 842, 844, 846, 852, 854, 856, 862, 864, 866, 872, 874, 880, 882, 884, 886, 888, 890, 892, 894, 900, 902, 910, 912, 918, 920, 922, 931, 933, 939, 941, 943, 945, 951, 953, 955, 957, 959, 961, 967, 969, 977, 979, 981, 983, 985, 991, 993, 995, 997, 1003, 1005, 1017, 1025, 1027, 1029, 1031, 1033, 1035, 1041, 1047, 1049, 1055, 1057, 1059, 1061, 1063, 1069, 1071, 1073, 1075, 1077, 1083, 1089, 1091, 1093, 1103, 1105, 1113, 1115, 1117, 1123, 1125, 1131, 1133, 1135, 1141, 1143, 1145, 1147, 1149, 1152, 1154, 1156, 1158, 1160, 1166, 1168, 1170, 1176, 1178, 1180, 1186, 1188, 1194, 1196, 1198, 1200, 1206, 1212, 1214, 1216, 1218, 1220, 1222, 1224, 1226, 1228, 1230, 1236, 1242, 1244, 1246, 1248, 1250, 1256, 1258, 1260, 1262, 1268, 1270, 1272, 1278, 1280, 1282, 1284, 1286, 1288, 1290, 1296, 1302, 1304, 1306, 1308, 1314, 1316, 1318, 1320, 1322, 1324, 1326, 1328, 1330, 1332, 1334, 1336, 1338, 1340, 1342, 1350, 1352, 1358, 1360, 1362, 1364, 1370, 1372, 1378, 1384, 1386, 1392, 1394, 1396, 1398, 1404, 1406, 1412, 1414, 1420, 1426, 1432, 1434, and 1440 shown in Tables 1-124, a fragment thereof, or their complement.

47. An electronic library comprising a polynucleotide, or fragment thereof, comprising a CA polynucleotide sequence selected from the group consisting of the polynucleotide sequences of SEQ ID NOS: 4, 10, 16, 26, 32, 46, 60, 70, 80, 96, 114, 137, 153, 173, 187, 209, 223, 229, 235, 243, 255, 261, 267, 281, 293, 303, 311, 321, 341, 359, 367, 375, 383, 397, 407, 413, 427, 449, 455, 463, 473, 481, 491, 499, 507, 515, 521, 527, 541, 547, 555, 563, 643, 651, 659, 669, 681, 715, 723, 743, 749, 759, 775, 787, 793, 805, 811, 817, 823, 833, 839, 851, 861, 871, 879, 899, 909, 917, 930, 938, 950, 966, 976, 990, 1002, 1016, 1024, 1040, 1046, 1054, 1068, 1082, 1088, 1102, 1112, 1122, 1130, 1140, 1151, 1165, 1175, 1185, 1193, 1205, 1211, 1235, 1241, 1255, 1267, 1277, 1295, 1301, 1313, 1349, 1357, 1369, 1377, 1383, 1391, 1403, 1411, 1419, 1425, 1431, and 1439 shown in Tables 1-124, or its complement.

48. An electronic library comprising a polynucleotide, or fragment thereof, comprising a CA polynucleotide sequence selected from the group consisting of the polynucleotide sequences of SEQ ID NOS: 5, 11, 17, 19, 21, 27, 33, 47, 49, 51, 53, 55, 61, 63, 65, 71, 81, 83, 85, 87, 89, 97, 99, 101, 103, 105, 107, 109, 115, 117, 119, 121, 123, 125, 127, 129, 138, 140, 142, 144, 146, 148, 154, 156, 158, 160, 162, 164, 166, 168, 174, 176, 178, 180, 188, 190, 192, 194, 196, 198, 200, 202, 204, 210, 212, 214, 216, 218, 224, 230, 236, 238, 244, 246, 248, 250, 256, 262, 268, 270, 272, 274, 276, 282, 284, 286, 288, 294, 296, 298, 304, 306, 312, 314, 316, 322, 324, 326, 328, 330, 332, 342, 344, 346, 348, 350, 352, 354, 360, 368, 370, 376, 384, 386, 388, 390, 392, 398, 400, 402, 408, 414, 416, 418, 420, 428, 430, 432, 434, 436, 438, 440, 442, 444, 450, 456, 458, 464, 466, 468, 474, 476, 482, 484, 486, 492, 494, 500, 508, 510, 516, 522, 528, 530, 532, 534, 536, 542, 548, 550, 556, 558, 564, 566, 568, 570, 572, 574, 576, 578, 580, 582, 584, 586, 588, 590, 592, 594, 596, 598, 600, 602, 604, 606, 608, 610, 612, 614, 616, 618, 620, 622, 624, 626, 628, 630, 632, 634, 644, 646, 652, 654, 660, 662, 664, 670, 672, 674, 676, 682, 684, 686, 688, 690, 692, 694, 696, 698, 700, 702, 704, 706, 708, 710, 716, 718, 724, 726, 728, 730, 732, 734, 736, 744, 750, 752, 754, 760, 776, 778, 780, 782, 788, 794, 796, 798, 800, 806, 812, 818, 824, 826, 828, 834, 840, 842, 844, 846, 852, 854, 856, 862, 864, 866, 872, 874, 880, 882, 884, 886, 888, 890, 892, 894, 900, 902, 910, 912, 918, 920, 922, 931, 933, 939, 941, 943, 945, 951, 953, 955, 957, 959, 961, 967, 969, 977, 979, 981, 983, 985, 991, 993, 995, 997, 1003, 1005, 1017, 1025, 1027, 1029, 1031, 1033, 1035, 1041, 1047, 1049, 1055, 1057, 1059, 1061, 1063, 1069, 1071, 1073, 1075, 1077, 1083, 1089, 1091, 1093, 1103, 1105, 1113, 1115, 1117, 1123, 1125, 1131, 1133, 1135, 1141, 1143, 1145, 1147, 1149, 1152, 1154, 1156, 1158, 1160, 1166, 1168, 1170, 1176, 1178, 1180, 1186, 1188, 1194, 1196, 1198, 1200, 1206, 1212, 1214, 1216, 1218, 1220, 1222, 1224, 1226, 1228, 1230, 1236, 1242, 1244, 1246, 1248, 1250, 1256, 1258, 1260, 1262, 1268, 1270, 1272, 1278, 1280, 1282, 1284, 1286, 1288, 1290, 1296, 1302, 1304, 1306, 1308, 1314, 1316, 1318, 1320, 1322, 1324, 1326, 1328, 1330, 1332, 1334, 1336, 1338, 1340, 1342, 1350, 1352, 1358, 1360, 1362, 1364, 1370, 1372, 1378, 1384, 1386, 1392, 1394, 1396, 1398, 1404, 1406, 1412, 1414, 1420, 1426, 1432, 1434, and 1440 shown in Tables 1-124.

49. An electronic library comprising a polypeptide, or fragment thereof, comprising a CA polypeptide sequence selected from the group consisting of the polypeptide sequences of SEQ ID NOS: 6, 12, 18, 20, 22, 28, 34, 48, 50, 52, 54, 56, 62, 64, 66, 72, 82, 84, 86, 88, 90, 98, 100, 102, 104, 106, 108, 110, 116, 118, 120, 122, 124, 126, 128, 130, 139, 141, 143, 145, 147, 149, 155, 157, 159, 161, 163, 165, 167, 169, 175, 177, 179, 181, 189, 191, 193, 195, 197, 199, 201, 203, 205, 211, 213, 215, 217, 219, 225, 231, 237, 239, 245, 247, 249, 251, 257, 263, 269, 271, 273, 275, 277, 283, 285, 287, 289, 295, 297, 299, 305, 307, 313, 315, 317, 323, 325, 327, 329, 331, 333, 343, 345, 347, 349, 351, 353, 355, 361, 369, 371, 377, 385, 387, 389, 391, 393, 399, 401, 403, 409, 415, 417, 419, 421, 429, 431, 433, 435, 437, 439, 441, 443, 445, 451, 457, 459, 465, 467, 469, 475, 477, 483, 485, 487, 493, 495, 501, 509, 511, 517, 523, 529, 531, 533, 535, 537, 543, 549, 551, 557, 559, 565, 567, 569, 571, 573, 575, 577, 579, 581, 583, 585, 587, 589, 591, 593, 595, 597, 599, 601, 603, 605, 607, 609, 611, 613, 615, 617, 619, 621, 623, 625, 627, 629, 631, 633, 635, 645, 647, 653, 655, 661, 663, 665, 671, 673, 675, 677, 683, 685, 687, 689, 691, 693, 695, 697, 699, 701, 703, 705, 707, 709, 711, 717, 719, 725, 727, 729, 731, 733, 735, 737, 745, 751, 753, 755, 761, 777, 779, 781, 783, 789, 795, 797, 799, 801, 807, 813, 819, 825, 827, 829, 835, 841, 843, 845, 847, 853, 855, 857, 863, 865, 867, 873, 875, 881, 883, 885, 887, 889, 891, 893, 895, 901, 903, 911, 913, 919, 921, 923, 932, 934, 940, 942, 944, 946, 952, 954, 956, 958, 960, 962, 968, 970, 978, 980, 982, 984, 986, 992, 994, 996, 998, 1004, 1006, 1018, 1026, 1028, 1030, 1032, 1034, 1036, 1042, 1048, 1050, 1056, 1058, 1060, 1062, 1064, 1070, 1072, 1074, 1076, 1078, 1084, 1090, 1092, 1094, 1104, 1106, 1114, 1116, 1118, 1124, 1126, 1132, 1134, 1136, 1142, 1144, 1146, 1148, 1150, 1153, 1155, 1157, 1159, 1161, 1167, 1169, 1171, 1177, 1179, 1181, 1187, 1189, 1195, 1197, 1199, 1201, 1207, 1213, 1215, 1217, 1219, 1221, 1223, 1225, 1227, 1229, 1231, 1237, 1243, 1245, 1247, 1249, 1251, 1257, 1259, 1261, 1263, 1269, 1271, 1273, 1279, 1281, 1283, 1285, 1287, 1289, 1291, 1297, 1303, 1305, 1307, 1309, 1315, 1317, 1319, 1321, 1323, 1325, 1327, 1329, 1331, 1333, 1335, 1337, 1339, 1341, 1343, 1351, 1353, 1359, 1361, 1363, 1365, 1371, 1373, 1379, 1385, 1387, 1393, 1395, 1397, 1399, 1405, 1407, 1413, 1415, 1421, 1427, 1433, 1435, and 1441 shown in Tables 1-124.

50. A method of screening for anticancer activity comprising:
(a) providing a cell that expresses a cancer associated (CA) gene encoded by a nucleic acid sequence selected from the group consisting of the sequences SEQ ID NOS: 4, 10, 16, 26, 32, 46, 60, 70, 80, 96, 114, 137, 153, 173, 187, 209, 223, 229, 235, 243, 255, 261, 267, 281, 293, 303, 311, 321, 341, 359, 367, 375, 383, 397, 407, 413, 427, 449, 455, 463, 473, 481, 491, 499, 507, 515, 521, 527, 541, 547, 555, 563, 643, 651, 659, 669, 681, 715, 723, 743, 749, 759, 775, 787, 793, 805, 811, 817, 823, 833, 839, 851, 861, 871, 879, 899, 909, 917, 930, 938, 950, 966, 976, 990, 1002, 1016, 1024, 1040, 1046, 1054, 1068, 1082, 1088, 1102, 1112, 1122, 1130, 1140, 1151, 1165, 1175, 1185, 1193, 1205, 1211, 1235, 1241, 1255, 1267, 1277, 1295, 1301, 1313, 1349, 1357, 1369, 1377, 1383, 1391, 1403, 1411, 1419, 1425, 1431, and 1439 shown in Tables 1-124, or fragment thereof;
(b) contacting a tissue sample derived from a cancer cell with an anticancer drug candidate; and
(c) monitoring an effect of the anticancer drug candidate on an expression of the CA polynucleotide in the tissue sample.

51. The method of screening for anticancer activity according to claim 50, wherein the CA gene comprises at least one nucleic acid sequence selected from the group consisting of the sequences SEQ ID NOS: 5, 11, 17, 19, 21, 27, 33, 47, 49, 51, 53, 55, 61, 63, 65, 71, 81, 83, 85, 87, 89, 97, 99, 101, 103, 105, 107, 109, 115, 117, 119, 121, 123, 125, 127, 129, 138, 140, 142, 144, 146, 148, 154, 156, 158, 160, 162, 164, 166, 168, 174, 176, 178, 180, 188, 190, 192, 194, 196, 198, 200, 202, 204, 210, 212, 214, 216, 218, 224, 230, 236, 238, 244, 246, 248, 250, 256, 262, 268, 270, 272, 274, 276, 282, 284, 286, 288, 294, 296, 298, 304, 306, 312, 314, 316, 322, 324, 326, 328, 330, 332, 342, 344, 346, 348, 350, 352, 354, 360, 368, 370, 376, 384, 386, 388, 390, 392, 398, 400, 402, 408, 414, 416, 418, 420, 428, 430, 432, 434, 436, 438, 440, 442, 444, 450, 456, 458, 464, 466, 468, 474, 476, 482, 484, 486, 492, 494, 500, 508, 510, 516, 522, 528, 530, 532, 534, 536, 542, 548, 550, 556, 558, 564, 566, 568, 570, 572, 574, 576, 578, 580, 582, 584, 586, 588, 590, 592, 594, 596, 598, 600, 602, 604, 606, 608, 610, 612, 614, 616, 618, 620, 622, 624, 626, 628, 630, 632, 634, 644, 646, 652, 654, 660, 662, 664, 670, 672, 674, 676, 682, 684, 686, 688, 690, 692, 694, 696, 698, 700, 702, 704, 706, 708, 710, 716, 718, 724, 726, 728, 730, 732, 734, 736, 744, 750, 752, 754, 760, 776, 778, 780, 782, 788, 794, 796, 798, 800, 806, 812, 818, 824, 826, 828, 834, 840, 842, 844, 846, 852, 854, 856, 862, 864, 866, 872, 874, 880, 882, 884, 886, 888, 890, 892, 894, 900, 902, 910, 912, 918, 920, 922, 931, 933, 939, 941, 943, 945, 951, 953, 955, 957, 959, 961, 967, 969, 977, 979, 981, 983, 985, 991, 993, 995, 997, 1003, 1005, 1017, 1025, 1027, 1029, 1031, 1033, 1035, 1041, 1047, 1049, 1055, 1057, 1059, 1061, 1063, 1069, 1071, 1073, 1075, 1077, 1083, 1089, 1091, 1093, 1103, 1105, 1113, 1115, 1117, 1123, 1125, 1131, 1133, 1135, 1141, 1143, 1145, 1147, 1149, 1152, 1154, 1156, 1158, 1160, 1166, 1168, 1170, 1176, 1178, 1180, 1186, 1188, 1194, 1196, 1198, 1200, 1206, 1212, 1214, 1216, 1218, 1220, 1222, 1224, 1226, 1228, 1230, 1236, 1242, 1244, 1246, 1248, 1250, 1256, 1258, 1260, 1262, 1268, 1270, 1272, 1278, 1280, 1282, 1284, 1286, 1288, 1290, 1296, 1302, 1304, 1306, 1308, 1314, 1316, 1318, 1320, 1322, 1324, 1326, 1328, 1330, 1332, 1334, 1336, 1338, 1340, 1342, 1350, 1352, 1358, 1360, 1362, 1364, 1370, 1372, 1378, 1384, 1386, 1392, 1394, 1396, 1398, 1404, 1406, 1412, 1414, 1420, 1426, 1432, 1434, and 1440 shown in Tables 1-124.

52. The method of screening for anticancer activity according to claim 50, further comprising:
(d) comparing the level of expression in the absence of said drug candidate to the level of expression in the presence of the drug candidate.

53. The method of screening for anticancer activity according to claim 50, wherein the drug candidate is an inhibitor of transcription and further wherein the nucleic acid sequence is selected from the group consisting of SEQ ID NOS: 5, 11, 17, 19, 21, 27, 33, 47, 49, 51, 53, 55, 61, 63, 65, 71, 81, 83, 85, 87, 89, 97, 99, 101, 103, 105, 107, 109, 115, 117, 119, 121, 123, 125, 127, 129, 138, 140, 142, 144, 146, 148, 154, 156, 158, 160, 162, 164, 166, 168, 174, 176, 178, 180, 188, 190, 192, 194, 196, 198, 200, 202, 204, 210, 212, 214, 216, 218, 224, 230, 236, 238, 244, 246, 248, 250, 256, 262, 268, 270, 272, 274, 276, 282, 284, 286, 288, 294, 296, 298, 304, 306, 312, 314, 316, 322, 324, 326, 328, 330, 332, 342, 344, 346, 348, 350, 352, 354, 360, 368, 370, 376, 384, 386, 388, 390, 392, 398, 400, 402, 408, 414, 416, 418, 420, 428, 430, 432, 434, 436, 438, 440, 442, 444, 450, 456, 458, 464, 466, 468, 474, 476, 482, 484, 486, 492, 494, 500, 508, 510, 516, 522, 528, 530, 532, 534, 536, 542, 548, 550, 556, 558, 564, 566, 568, 570, 572, 574, 576, 578, 580, 582, 584, 586, 588, 590, 592, 594, 596, 598, 600, 602, 604, 606, 608, 610, 612, 614, 616, 618, 620, 622, 624, 626, 628, 630, 632, 634, 644, 646, 652, 654, 660, 662, 664, 670, 672, 674, 676, 682, 684, 686, 688, 690, 692, 694, 696, 698, 700, 702, 704, 706, 708, 710, 716, 718, 724, 726, 728, 730, 732, 734, 736, 744, 750, 752, 754, 760, 776, 778, 780, 782, 788, 794, 796, 798, 800, 806, 812, 818, 824, 826, 828, 834, 840, 842, 844, 846, 852, 854, 856, 862, 864, 866, 872, 874, 880, 882, 884, 886, 888, 890, 892, 894, 900, 902, 910, 912, 918, 920, 922, 931, 933, 939, 941, 943, 945, 951, 953, 955, 957, 959, 961, 967, 969, 977, 979, 981, 983, 985, 991, 993, 995, 997, 1003, 1005, 1017, 1025, 1027, 1029, 1031, 1033, 1035, 1041, 1047, 1049, 1055, 1057, 1059, 1061, 1063, 1069, 1071, 1073, 1075, 1077, 1083, 1089, 1091, 1093, 1103, 1105, 1113, 1115, 1117, 1123, 1125, 1131, 1133, 1135, 1141, 1143, 1145, 1147, 1149, 1152, 1154, 1156, 1158, 1160, 1166, 1168, 1170, 1176, 1178, 1180, 1186, 1188, 1194, 1196, 1198, 1200, 1206, 1212, 1214, 1216, 1218, 1220, 1222, 1224, 1226, 1228, 1230, 1236, 1242, 1244, 1246, 1248, 1250, 1256, 1258, 1260, 1262, 1268, 1270, 1272, 1278, 1280, 1282, 1284, 1286, 1288, 1290, 1296, 1302, 1304, 1306, 1308, 1314, 1316, 1318, 1320, 1322, 1324, 1326, 1328, 1330, 1332, 1334, 1336, 1338, 1340, 1342, 1350, 1352, 1358, 1360, 1362, 1364, 1370, 1372, 1378, 1384, 1386, 1392, 1394, 1396, 1398, 1404, 1406, 1412, 1414, 1420, 1426, 1432, 1434, and 1440 shown in Tables 1-124.

54. A method for detecting cancer associated with expression of a polypeptide in a test cell sample, comprising the steps of:
(i) detecting a level of expression of at least one polypeptide selected from the group consisting of SEQ ID NOS: 6, 12, 18, 20, 22, 28, 34, 48, 50, 52, 54, 56, 62, 64, 66, 72, 82, 84, 86, 88, 90, 98, 100, 102, 104, 106, 108, 110, 116, 118, 120, 122, 124, 126, 128, 130, 139, 141, 143, 145, 147, 149, 155, 157, 159, 161, 163, 165, 167, 169, 175, 177, 179, 181, 189, 191, 193, 195, 197, 199, 201, 203, 205, 211, 213, 215, 217, 219, 225, 231, 237, 239, 245, 247, 249, 251, 257, 263, 269, 271, 273, 275, 277, 283, 285, 287, 289, 295, 297, 299, 305, 307, 313, 315, 317, 323, 325, 327, 329, 331, 333, 343, 345, 347, 349, 351, 353, 355, 361, 369, 371, 377, 385, 387, 389, 391, 393, 399, 401, 403, 409, 415, 417, 419, 421, 429, 431, 433, 435, 437, 439, 441, 443, 445, 451, 457, 459, 465, 467, 469, 475, 477, 483, 485, 487, 493, 495, 501, 509, 511, 517, 523, 529, 531, 533, 535, 537, 543, 549, 551, 557, 559, 565, 567, 569, 571, 573, 575, 577, 579, 581, 583, 585, 587, 589, 591, 593, 595, 597, 599, 601, 603, 605, 607, 609, 611, 613, 615, 617, 619, 621, 623, 625, 627, 629, 631, 633, 635, 645, 647, 653, 655, 661, 663, 665, 671, 673, 675, 677, 683, 685, 687, 689, 691, 693, 695, 697, 699, 701, 703, 705, 707, 709, 711, 717, 719, 725, 727, 729, 731, 733, 735, 737, 745, 751, 753, 755, 761, 777, 779, 781, 783, 789, 795, 797, 799, 801, 807, 813, 819, 825, 827, 829, 835, 841, 843, 845, 847, 853, 855, 857, 863, 865, 867, 873, 875, 881, 883, 885, 887, 889, 891, 893, 895, 901, 903, 911, 913, 919, 921, 923, 932, 934, 940, 942, 944, 946, 952, 954, 956, 958, 960, 962, 968, 970, 978, 980, 982, 984, 986, 992, 994, 996, 998, 1004, 1006, 1018, 1026, 1028, 1030, 1032, 1034, 1036, 1042, 1048, 1050, 1056, 1058, 1060, 1062, 1064, 1070, 1072, 1074, 1076, 1078, 1084, 1090, 1092, 1094, 1104, 1106, 1114, 1116, 1118, 1124, 1126, 1132, 1134, 1136, 1142, 1144, 1146, 1148, 1150, 1153, 1155, 1157, 1159, 1161, 1167, 1169, 1171, 1177, 1179, 1181, 1187, 1189, 1195, 1197, 1199, 1201, 1207, 1213, 1215, 1217, 1219, 1221, 1223, 1225, 1227, 1229, 1231, 1237, 1243, 1245, 1247, 1249, 1251, 1257, 1259, 1261, 1263, 1269, 1271, 1273, 1279, 1281, 1283, 1285, 1287, 1289, 1291, 1297, 1303, 1305, 1307, 1309, 1315, 1317, 1319, 1321, 1323, 1325, 1327, 1329, 1331, 1333, 1335, 1337, 1339, 1341, 1343, 1351, 1353, 1359, 1361, 1363, 1365, 1371, 1373, 1379, 1385, 1387, 1393, 1395, 1397, 1399, 1405, 1407, 1413, 1415, 1421, 1427, 1433, 1435, and 1441 shown in Tables 1-124, or a fragment thereof; and
(ii) comparing the level of expression of the polypeptide in the test sample with a level of expression of polypeptide in a normal cell sample, wherein an altered level of expression of the polypeptide in the test cell sample relative to the level of polypeptide expression in the normal cell sample is indicative of the presence of cancer in the test cell sample.

55. A method for detecting cancer associated with expression of a polypeptide in a test cell sample, comprising the steps of:
(i) detecting a level of activity of at least one polypeptide selected from the group consisting of SEQ ID NOS: 6, 12, 18, 20, 22, 28, 34, 48, 50, 52, 54, 56, 62, 64, 66, 72, 82, 84, 86, 88, 90, 98, 100, 102, 104, 106, 108, 110, 116, 118, 120, 122, 124, 126, 128, 130, 139, 141, 143, 145, 147, 149, 155, 157, 159, 161, 163, 165, 167, 169, 175, 177, 179, 181, 189, 191, 193, 195, 197, 199, 201, 203, 205, 211, 213, 215, 217, 219, 225, 231, 237, 239, 245, 247, 249, 251, 257, 263, 269, 271, 273, 275, 277, 283, 285, 287, 289, 295, 297, 299, 305, 307, 313, 315, 317, 323, 325, 327, 329, 331, 333, 343, 345, 347, 349, 351, 353, 355, 361, 369, 371, 377, 385, 387, 389, 391, 393, 399, 401, 403, 409, 415, 417, 419, 421, 429, 431, 433, 435, 437, 439, 441, 443, 445, 451, 457, 459, 465, 467, 469, 475, 477, 483, 485, 487, 493, 495, 501, 509, 511, 517, 523, 529, 531, 533, 535, 537, 543, 549, 551, 557, 559, 565, 567, 569, 571, 573, 575, 577, 579, 581, 583, 585, 587, 589, 591, 593, 595, 597, 599, 601, 603, 605, 607, 609, 611, 613, 615, 617, 619, 621, 623, 625, 627, 629, 631, 633, 635, 645, 647, 653, 655, 661, 663, 665, 671, 673, 675, 677, 683, 685, 687, 689, 691, 693, 695, 697, 699, 701, 703, 705, 707, 709, 711, 717, 719, 725, 727, 729, 731, 733, 735, 737, 745, 751, 753, 755, 761, 777, 779, 781, 783, 789, 795, 797, 799, 801, 807, 813, 819, 825, 827, 829, 835, 841, 843, 845, 847, 853, 855, 857, 863, 865, 867, 873, 875, 881, 883, 885, 887, 889, 891, 893, 895, 901, 903, 911, 913, 919, 921, 923, 932, 934, 940, 942, 944, 946, 952, 954, 956, 958, 960, 962, 968, 970, 978, 980, 982, 984, 986, 992, 994, 996, 998, 1004, 1006, 1018, 1026, 1028, 1030, 1032, 1034, 1036, 1042, 1048, 1050, 1056, 1058, 1060, 1062, 1064, 1070, 1072, 1074, 1076, 1078, 1084, 1090, 1092, 1094, 1104, 1106, 1114, 1116, 1118, 1124, 1126, 1132, 1134, 1136, 1142, 1144, 1146, 1148, 1150, 1153, 1155, 1157, 1159, 1161, 1167, 1169, 1171, 1177, 1179, 1181, 1187, 1189, 1195, 1197, 1199, 1201, 1207, 1213, 1215, 1217, 1219, 1221, 1223, 1225, 1227, 1229, 1231, 1237, 1243, 1245, 1247, 1249, 1251, 1257, 1259, 1261, 1263, 1269, 1271, 1273, 1279, 1281, 1283, 1285, 1287, 1289, 1291, 1297, 1303, 1305, 1307, 1309, 1315, 1317, 1319, 1321, 1323, 1325, 1327, 1329, 1331, 1333, 1335, 1337, 1339, 1341, 1343, 1351, 1353, 1359, 1361, 1363, 1365, 1371, 1373, 1379, 1385, 1387, 1393, 1395, 1397, 1399, 1405, 1407, 1413, 1415, 1421, 1427, 1433, 1435, and 1441 shown in Tables 1-124, or a fragment thereof, wherein said activity corresponds to at least one activity for the polypeptide listed in Tables 1-124; and
(ii) comparing the level of activity of the polypeptide in the test sample with a level of activity of polypeptide in a normal cell sample, wherein an altered level of activity of the polypeptide in the test cell sample relative to the level of polypeptide activity in the normal cell sample is indicative of the presence of cancer in the test cell sample.

56. A method for detecting cancer associated with the presence of an antibody in a test serum sample, comprising the steps of:
(i) detecting a level of an antibody against an antigenic polypeptide selected from the group consisting of SEQ ID NOS: 6, 12, 18, 20, 22, 28, 34, 48, 50, 52, 54, 56, 62, 64, 66, 72, 82, 84, 86, 88, 90, 98, 100, 102, 104, 106, 108, 110, 116, 118, 120, 122, 124, 126, 128, 130, 139, 141, 143, 145, 147, 149, 155, 157, 159, 161, 163, 165, 167, 169, 175, 177, 179, 181, 189, 191, 193, 195, 197, 199, 201, 203, 205, 211, 213, 215, 217, 219, 225, 231, 237, 239, 245, 247, 249, 251, 257, 263, 269, 271, 273, 275, 277, 283, 285, 287, 289, 295, 297, 299, 305, 307, 313, 315, 317, 323, 325, 327, 329, 331, 333, 343, 345, 347, 349, 351, 353, 355, 361, 369, 371, 377, 385, 387, 389, 391, 393, 399, 401, 403, 409, 415, 417, 419, 421, 429, 431, 433, 435, 437, 439, 441, 443, 445, 451, 457, 459, 465, 467, 469, 475, 477, 483, 485, 487, 493, 495, 501, 509, 511, 517, 523, 529, 531, 533, 535, 537, 543, 549, 551, 557, 559, 565, 567, 569, 571, 573, 575, 577, 579, 581, 583, 585, 587, 589, 591, 593, 595, 597, 599, 601, 603, 605, 607, 609, 611, 613, 615, 617, 619, 621, 623, 625, 627, 629, 631, 633, 635, 645, 647, 653, 655, 661, 663, 665, 671, 673, 675, 677, 683, 685, 687, 689, 691, 693, 695, 697, 699, 701, 703, 705, 707, 709, 711, 717, 719, 725, 727, 729, 731, 733, 735, 737, 745, 751, 753, 755, 761, 777, 779, 781, 783, 789, 795, 797, 799, 801, 807, 813, 819, 825, 827, 829, 835, 841, 843, 845, 847, 853, 855, 857, 863, 865, 867, 873, 875, 881, 883, 885, 887, 889, 891, 893, 895, 901, 903, 911, 913, 919, 921, 923, 932, 934, 940, 942, 944, 946, 952, 954, 956, 958, 960, 962, 968, 970, 978, 980, 982, 984, 986, 992, 994, 996, 998, 1004, 1006, 1018, 1026, 1028, 1030, 1032, 1034, 1036, 1042, 1048, 1050, 1056, 1058, 1060, 1062, 1064, 1070, 1072, 1074, 1076, 1078, 1084, 1090, 1092, 1094, 1104, 1106, 1114, 1116, 1118, 1124, 1126, 1132, 1134, 1136, 1142, 1144, 1146, 1148, 1150, 1153, 1155, 1157, 1159, 1161, 1167, 1169, 1171, 1177, 1179, 1181, 1187, 1189, 1195, 1197, 1199, 1201, 1207, 1213, 1215, 1217, 1219, 1221, 1223, 1225, 1227, 1229, 1231, 1237, 1243, 1245, 1247, 1249, 1251, 1257, 1259, 1261, 1263, 1269, 1271, 1273, 1279, 1281, 1283, 1285, 1287, 1289, 1291, 1297, 1303, 1305, 1307, 1309, 1315, 1317, 1319, 1321, 1323, 1325, 1327, 1329, 1331, 1333, 1335, 1337, 1339, 1341, 1343, 1351, 1353, 1359, 1361, 1363, 1365, 1371, 1373, 1379, 1385, 1387, 1393, 1395, 1397, 1399, 1405, 1407, 1413, 1415, 1421, 1427, 1433, 1435, and 1441 shown in Tables 1-124, or antigenic fragment thereof; and
(ii) comparing said level of said antibody in the test sample with a level of said antibody in the control sample, wherein an altered level of antibody in said test sample relative to the level of antibody in the control sample is indicative of the presence of cancer in the test serum sample.

57. A method for screening for a bioactive agent capable of modulating the activity of a CA protein (CAP), wherein said CAP is encoded by a nucleic acid comprising a nucleic acid sequence selected from the group consisting of the polynucleotide sequences SEQ ID NOS: 5, 11, 17, 19, 21, 27, 33, 47, 49, 51, 53, 55, 61, 63, 65, 71, 81, 83, 85, 87, 89, 97, 99, 101, 103, 105, 107, 109, 115, 117, 119, 121, 123, 125, 127, 129, 138, 140, 142, 144, 146, 148, 154, 156, 158, 160, 162, 164, 166, 168, 174, 176, 178, 180, 188, 190, 192, 194, 196, 198, 200, 202, 204, 210, 212, 214, 216, 218, 224, 230, 236, 238, 244, 246, 248, 250, 256, 262, 268, 270, 272, 274, 276, 282, 284, 286, 288, 294, 296, 298, 304, 306, 312, 314, 316, 322, 324, 326, 328, 330, 332, 342, 344, 346, 348, 350, 352, 354, 360, 368, 370, 376, 384, 386, 388, 390, 392, 398, 400, 402, 408, 414, 416, 418, 420, 428, 430, 432, 434, 436, 438, 440, 442, 444, 450, 456, 458, 464, 466, 468, 474, 476, 482, 484, 486, 492, 494, 500, 508, 510, 516, 522, 528, 530, 532, 534, 536, 542, 548, 550, 556, 558, 564, 566, 568, 570, 572, 574, 576, 578, 580, 582, 584, 586, 588, 590, 592, 594, 596, 598, 600, 602, 604, 606, 608, 610, 612, 614, 616, 618, 620, 622, 624, 626, 628, 630, 632, 634, 644, 646, 652, 654, 660, 662, 664, 670, 672, 674, 676, 682, 684, 686, 688, 690, 692, 694, 696, 698, 700, 702, 704, 706, 708, 710, 716, 718, 724, 726, 728, 730, 732, 734, 736, 744, 750, 752, 754, 760, 776, 778, 780, 782, 788, 794, 796, 798, 800, 806, 812, 818, 824, 826, 828, 834, 840, 842, 844, 846, 852, 854, 856, 862, 864, 866, 872, 874, 880, 882, 884, 886, 888, 890, 892, 894, 900, 902, 910, 912, 918, 920, 922, 931, 933, 939, 941, 943, 945, 951, 953, 955, 957, 959, 961, 967, 969, 977, 979, 981, 983, 985, 991, 993, 995, 997, 1003, 1005, 1017, 1025, 1027, 1029, 1031, 1033, 1035, 1041, 1047, 1049, 1055, 1057, 1059, 1061, 1063, 1069, 1071, 1073, 1075, 1077, 1083, 1089, 1091, 1093, 1103, 1105, 1113, 1115, 1117, 1123, 1125, 1131, 1133, 1135, 1141, 1143, 1145, 1147, 1149, 1152, 1154, 1156, 1158, 1160, 1166, 1168, 1170, 1176, 1178, 1180, 1186, 1188, 1194, 1196, 1198, 1200, 1206, 1212, 1214, 1216, 1218, 1220, 1222, 1224, 1226, 1228, 1230, 1236, 1242, 1244, 1246, 1248, 1250, 1256, 1258, 1260, 1262, 1268, 1270, 1272, 1278, 1280, 1282, 1284, 1286, 1288, 1290, 1296, 1302, 1304, 1306, 1308, 1314, 1316, 1318, 1320, 1322, 1324, 1326, 1328, 1330, 1332, 1334, 1336, 1338, 1340, 1342, 1350, 1352, 1358, 1360, 1362, 1364, 1370, 1372, 1378, 1384, 1386, 1392, 1394, 1396, 1398, 1404, 1406, 1412, 1414, 1420, 1426, 1432, 1434, and 1440 shown in Tables 1-124, said method comprising:
a) combining said CAP and a candidate bioactive agent; and
b) determining the effect of the candidate agent on the bioactivity of said CAP.

58. The method of screening for the bioactive agent according to claim 57, wherein the bioactive agent affects the expression of the CA protein (CAP).

59. The method of screening for the bioactive agent according to claim 57, wherein the bioactive agent affects the activity of the CA protein (CAP), wherein such activity is selected from the activities listed in Tables 1-124.

60. The method of screening for the bioactive agent according to claim 57, wherein the bioactive agent is a modulator of an activity selected from the group consisting of: tumor suppressor, low density lipoprotein receptor, G protein coupled receptor, apoptosis inhibitor, ion transport, calcium binding, cell adhesion, signalling, protein kinase receptor, and signal transduction.

61. A method for diagnosing cancer comprising:
a) determining the expression of one or more genes comprising a nucleic acid sequence selected from the group consisting of the human genomic and mRNA sequences outlined in Tables 1-124, in a first tissue type of a first individual; and
b) comparing said expression of said gene(s) from a second normal tissue type from said first individual or a second unaffected individual;
wherein a difference in said expression indicates that the first individual has cancer.

62. A method for treating cancers comprising administering to a patient an inhibitor of a CA protein (CAP), wherein said CAP is encoded by a nucleic acid comprising a nucleic acid sequence selected from the group consisting of the human nucleic acid sequences in Tables 1-124.

63. The method for treating cancers according to claim 62, wherein the inhibitor of a CA protein (CAP) binds to the CA protein.

64. A method for inhibiting expression of a cancer associated (CA) gene in a cell comprising:
contacting a cell expressing a CA gene with a double stranded RNA comprising a sequence capable of hybridizing to a cancer associated (CA) mRNA corresponding to the polynucleotide sequences of SEQ ID NOS: 5, 11, 17, 19, 21, 27, 33, 47, 49, 51, 53, 55, 61, 63, 65, 71, 81, 83, 85, 87, 89, 97, 99, 101, 103, 105, 107, 109, 115, 117, 119, 121, 123, 125, 127, 129, 138, 140, 142, 144, 146, 148, 154, 156, 158, 160, 162, 164, 166, 168, 174, 176, 178, 180, 188, 190, 192, 194, 196, 198, 200, 202, 204, 210, 212, 214, 216, 218, 224, 230, 236, 238, 244, 246, 248, 250, 256, 262, 268, 270, 272, 274, 276, 282, 284, 286, 288, 294, 296, 298, 304, 306, 312, 314, 316, 322, 324, 326, 328, 330, 332, 342, 344, 346, 348, 350, 352, 354, 360, 368, 370, 376, 384, 386, 388, 390, 392, 398, 400, 402, 408, 414, 416, 418, 420, 428, 430, 432, 434, 436, 438, 440, 442, 444, 450, 456, 458, 464, 466, 468, 474, 476, 482, 484, 486, 492, 494, 500, 508, 510, 516, 522, 528, 530, 532, 534, 536, 542, 548, 550, 556, 558, 564, 566, 568, 570, 572, 574, 576, 578, 580, 582, 584, 586, 588, 590, 592, 594, 596, 598, 600, 602, 604, 606, 608, 610, 612, 614, 616, 618, 620, 622, 624, 626, 628, 630, 632, 634, 644, 646, 652, 654, 660, 662, 664, 670, 672, 674, 676, 682, 684, 686, 688, 690, 692, 694, 696, 698, 700, 702, 704, 706, 708, 710, 716, 718, 724, 726, 728, 730, 732, 734, 736, 744, 750, 752, 754, 760, 776, 778, 780, 782, 788, 794, 796, 798, 800, 806, 812, 818, 824, 826, 828, 834, 840, 842, 844, 846, 852, 854, 856, 862, 864, 866, 872, 874, 880, 882, 884, 886, 888, 890, 892, 894, 900, 902, 910, 912, 918, 920, 922, 931, 933, 939, 941, 943, 945, 951, 953, 955, 957, 959, 961, 967, 969, 977, 979, 981, 983, 985, 991, 993, 995, 997, 1003, 1005, 1017, 1025, 1027, 1029, 1031, 1033, 1035, 1041, 1047, 1049, 1055, 1057, 1059, 1061, 1063, 1069, 1071, 1073, 1075, 1077, 1083, 1089, 1091, 1093, 1103, 1105, 1113, 1115, 1117, 1123, 1125, 1131, 1133, 1135, 1141, 1143, 1145, 1147, 1149, 1152, 1154, 1156, 1158, 1160, 1166, 1168, 1170, 1176, 1178, 1180, 1186, 1188, 1194, 1196, 1198, 1200, 1206, 1212, 1214, 1216, 1218, 1220, 1222, 1224, 1226, 1228, 1230, 1236, 1242, 1244, 1246, 1248, 1250, 1256, 1258, 1260, 1262, 1268, 1270, 1272, 1278, 1280, 1282, 1284, 1286, 1288, 1290, 1296, 1302, 1304, 1306, 1308, 1314, 1316, 1318, 1320, 1322, 1324, 1326, 1328, 1330, 1332, 1334, 1336, 1338, 1340, 1342, 1350, 1352, 1358, 1360, 1362, 1364, 1370, 1372, 1378, 1384, 1386, 1392, 1394, 1396, 1398, 1404, 1406, 1412, 1414, 1420, 1426, 1432, 1434, and 1440 shown in Tables 1-124, in an amount sufficient to elicit RNA interference; and
inhibiting expression of the CA gene in the cell.

65. The method of claim 64, wherein the double stranded RNA is provided by introducing a short interfering RNA (siRNA) into the cell by a method selected from the group consisting of transfection, electroporation, and microinjection.

66. The method of claim 64, wherein the double stranded RNA is provided by introducing a short interfering RNA (siRNA) into the cell by an expression vector.
